(19) United States
(12) Patent Application Publication
(10) Pub. No.: US 2025/0018056 A1
(43) Pub. Date: Jan. 16, 2025

(54) STRATEGIES FOR KNOCK-INS AT C3 SAFE HARBOR SITES

(71) Applicant: EmendoBio Inc., Wilmington, DE (US)

(72) Inventors: Rafi Emmanuel, Ramla (IL); Michal Golan Mashiach, Ness Ziona (IL); Joseph Dicken, Rehovot (IL)

(73) Assignee: EmendoBio Inc., Wilmington, DE (US)

(21) Appl. No.: 18/549,791

(22) PCT Filed: Mar. 10, 2022
(86) PCT No.: PCT/US2022/019701

§ 371 Date: Sep. 8, 2023

Related U.S. Application Data
(60) Provisional application No. 63/159,602, filed on Mar. 11, 2021.

(51) Int. Cl. A61K 48/00; A61P 1/16; C12N 9/22; C12N 15/11; C12N 15/90

(52) U.S. Cl. CPC A61K 48/005; A61P 1/16; C12N 9/22; C12N 15/111; C12N 15/902; C12N 2310/10

(57) ABSTRACT

RNA molecules comprising a guide sequence portion having 17-50 contiguous nucleotides in the sequence set forth in any one of SEQ ID NOs: 1-7,046 and compositions, methods, and uses thereof.

[0001] This application claims the benefit of U.S. Provisional Application No. 63/159,602, filed Mar. 11, 2021, the contents of which are hereby incorporated by reference.

[0002] Throughout this application, various publications are referenced, including referenced in parenthesis. The disclosures of all publications mentioned in this application in their entireties are hereby incorporated by reference into this application in order to provide additional description of the art to which this invention pertains and of the features in the art which can be employed with this invention.

### REFERENCE TO SEQUENCE LISTING

[0003] This application incorporates-by-reference nucleotide sequences which are present in the file named “220310_91702-A-PCT_Sequence_Listing_AWG.txt”, which is 1,526 kilobytes in size, and which was created on Feb. 28, 2022 in the IBM-PC machine format, having an operating system compatibility with MS-Windows, which is contained in the text file filed Mar. 10, 2022 as part of this application.

### BACKGROUND OF INVENTION

[0004] There are several classes of DNA variation in the human genome, including insertions and deletions, differences in the copy number of repeated sequences, and single nucleotide polymorphisms (SNPs). A SNP is a DNA sequence variation occurring when a single nucleotide (adenine (A), thymine (T), cytosine (C), or guanine (G)) in the genome differs between human subjects or paired chromosomes in an individual. Over the years, the different types of DNA variations have been the focus of the research community either as markers in studies to pinpoint traits or disease causation or as potential causes of genetic disorders.

[0005] DNA variations may also be utilized to target a specific DNA site in a cell. For example, an allele-specific Complement component 3 (C3) safe harbor site may be targeted to introduce a sequence to the site without causing deleterious disruptions. Such targeting strategies may be utilized to enable C3 promoter mediated expression of the introduced sequence in order to treat liver-related disorders.

### SUMMARY OF THE INVENTION

[0006] Disclosed herein are strategies to enable the expression of a gene, or portion thereof, under control of the C3 promoter optionally without knocking-out C3 gene expression.

[0007] The present disclosure may utilize at least one naturally occurring nucleotide difference or polymorphism (e.g., single nucleotide polymorphism (SNP)) for distinguishing/discriminating between two alleles of a C3 gene.

[0008] The present disclosure also provides a method for modifying in a cell an allele of the Complement component 3 (C3) gene, the method comprising
[0009] introducing to the cell a composition comprising:
   [0010] at least one CRISPR nuclease or a nucleotide sequence encoding a CRISPR nuclease; and
   [0011] a RNA molecule comprising a guide sequence portion having 17-50 nucleotides or a nucleotide sequence encoding the same,
[0012] wherein a complex of the CRISPR nuclease and the RNA molecule affects a double strand break in the allele of the C3 gene.

[0013] In some embodiments, the composition also comprises a donor molecule, wherein a sequence of nucleotides from the donor molecule is inserted or copied at or near the double strand break site. Similarly, in some embodiments, the composition further comprises a donor molecule containing a sequence of nucleotides that is introduced at the double strand break site such that the expression of the introduced sequence is mediated by the promoter of the C3 gene.

[0014] According to embodiments of the present invention, there is provided a first RNA molecule comprising a guide sequence portion having 17-50 contiguous nucleotides containing nucleotides in the sequence set forth in any one of SEQ ID NOs: 1-7,046. In some embodiments, the composition further comprises a CRISPR nuclease. In some embodiments, the composition further comprises a donor molecule.

[0015] According to embodiments of the present invention, there is provided a cell modified by any one of the methods described herein. In some embodiments, the cell is a stem cell. In some embodiments, the cell is a liver cell. In some embodiments, the cell is a hepatocyte. In some embodiments, the cell is an iPS-derived hepatocyte.

[0016] In some embodiments, the delivering of any one of the compositions described herein to the cell is performed in vitro, ex vivo, or in vivo. In some embodiments, the method is performed ex vivo and the cell is provided/explanted from an individual patient. In some embodiments, the method further comprises the step of introducing the resulting cell, with a modified or edited C3 allele, into the individual patient (e.g. autologous transplantation).

[0017] According to some embodiments of the present invention, there is provided a method for treating a liver-related disorder, the method comprising delivering to a cell of a subject having a liver-related disorder a composition comprising an RNA molecule comprising a guide sequence portion having 17-50 contiguous nucleotides containing nucleotides in the sequence set forth in any one of SEQ ID NOs: 1-7,046 and a CRISPR nuclease. In some embodiments, the composition further comprises a donor molecule.

[0018] According to some embodiments of the present invention, there is provided use of a composition comprising an RNA molecule comprising a guide sequence portion having 17-50 contiguous nucleotides containing nucleotides in the sequence set forth in any one of SEQ ID NOs: 1-7,046 and a CRISPR nuclease for modifying or editing a C3 allele in a cell, comprising delivering to the cell the composition comprising an RNA molecule comprising a guide sequence portion having 17-50 contiguous nucleotides containing nucleotides in the sequence set forth in any one of SEQ ID NOs: 1-7,046 and a CRISPR nuclease. In some embodiments, the composition further comprises a donor molecule.

[0019] According to embodiments of the present invention, there is provided a medicament comprising an RNA molecule comprising a guide sequence portion having 17-50 contiguous nucleotides containing nucleotides in the sequence set forth in any one of SEQ ID NOs: 1-7,046 and a CRISPR nuclease for use in modifying or editing a C3 allele in a cell, wherein the medicament is administered by delivering to the cell the composition comprising an RNA molecule comprising a guide sequence portion having 17-50 contiguous nucleotides containing nucleotides in the sequence set forth in any one of SEQ ID NOs: 1-7,046 and a CRISPR nuclease. In some embodiments, the medicament further comprises a donor molecule.

[0020] According to some embodiments of the present invention, there is provided use of a composition comprising an RNA molecule comprising a guide sequence portion having 17-50 contiguous nucleotides containing nucleotides in the sequence set forth in any one of SEQ ID NOs: 1-7,046 and a CRISPR nuclease for treating ameliorating or preventing a liver-related disorder, comprising delivering to a cell of a subject having or at risk of having a liver-related disorder the composition of comprising an RNA molecule comprising a guide sequence portion having 17-50 contiguous nucleotides containing nucleotides in the sequence set forth in any one of SEQ ID NOs: 1-7,046 and a CRISPR nuclease. In some embodiments, the composition further comprises a donor molecule. In some embodiments, the method is performed ex vivo and the cell is provided/explanted from the subject. In some embodiments, the method further comprises the step of introducing the resulting cell, with the modified or edited C3 allele, into the subject (e.g. autologous transplantation).

[0021] According to some embodiments of the present invention, there is provided a medicament comprising the composition comprising an RNA molecule comprising a guide sequence portion having 17-50 contiguous nucleotides containing nucleotides in the sequence set forth in any one of SEQ ID NOs: 1-7,046 and a CRISPR nuclease for use in treating ameliorating or preventing a liver-related disorder, wherein the medicament is administered by delivering to a cell of a subject having or at risk of having a liver-related disorder the composition comprising an RNA molecule comprising a guide sequence portion having 17-50 contiguous nucleotides containing nucleotides in the sequence set forth in any one of SEQ ID NOs: 1-7,046 and a CRISPR nuclease. In some embodiments, the medicament further comprises a donor molecule.

[0022] According to some embodiments of the present invention, there is provided a kit for modifying or editing C3 allele in a cell, comprising an RNA molecule comprising a guide sequence portion having 17-50 contiguous nucleotides containing nucleotides in the sequence set forth in any one of SEQ ID NOs: 1-7,046, a CRISPR nuclease, and/or a tracrRNA molecule; and instructions for delivering the RNA molecule; CRISPR nuclease, and/or the tracrRNA to the cell. In some embodiments, the kit further comprises a donor molecule.

[0023] According to some embodiments of the present invention, there is provided a kit for treating a liver-related disorder in a subject, comprising an RNA molecule comprising a guide sequence portion having 17-50 contiguous nucleotides containing nucleotides in the sequence set forth in any one of SEQ ID NOs: 1-7,046, a CRISPR nuclease, and/or a tracrRNA molecule; and instructions for delivering the RNA molecule; CRISPR nuclease, and/or the tracrRNA to a cell of a subject having or at risk of having a liver-related disorder. In some embodiments, the kit further comprises a donor molecule.

### BRIEF DESCRIPTION OF THE DRAWINGS

[0024] FIG. 1: Editing activity of RNA guide molecules targeting intron 1 of the C3 gene in HeLa cells. Cells were harvested 72 hours post-DNA transfection, genomic DNA was extracted, and the targeted region was amplified and analyzed for mutations by next-generation sequencing (NGS). The graph represents the % of editing ±standard deviation of three independent transfections.

[0025] FIG. 2: Activity of “g6” and “g11” guide molecules, which each intron 1 of the C3 gene. OMNI-79 guides were transfected in HeLa cells. RNPs with OMNI-50 protein and OMNI-50 synthetic RNA guide molecules were electroporated into HepG2 cells. Cells were harvested 72 hours post DNA transfection, genomic DNA was extracted, and the targeted region was amplified and analyzed for mutations by next-generation sequencing (NGS). The graph represents the % of editing ±standard deviation of three independent transfections or two independent RNP electroporations.

[0026] FIG. 3: Relative amount of C3 mRNA in edited samples compared to control samples. Cells were harvested seven (7) days after electroporation. RNA was then extracted and processed for RT-qPCR. The graph represents the relative amount of C3 mRNA in edited samples compared to control samples, ±standard deviation of two independent RNP electroporations.

[0027] FIG. 4: Insertion of GFP into a C3 endogenous locus by homology directed repair (HDR). Exon 1 encodes a signal peptide that is cleaved before secretion. GFP is spliced together with the exon 1 signal peptide that is to be secreted. In the schematic diagram, “Left HA” and “Right HA” refer to left and right homology arms, respectively, “SA” refers to a splice acceptor site, and “PolyA” refers to a polyadenylation signal.

[0028] FIG. 5: GFP expression 72 hours post-infection as measured by flow cytometry. HepG2 cells were infected with the indicated AAV viral particles, containing either a CRISPR nuclease (OMNI-79 V5570) and a guide (C3 g11) or a GFP homology directed repair (HDR) template. AAV containing a DNA molecule encoding GFP under a constitutive promoter was used as a positive control for infection efficiency evaluation. No GFP expression was detected in cells infected with the HDR template only, which indicates no off-target integration. Graphs represents the average ±standard deviation (n=3) of % GFP positive cells.

[0029] FIG. 6: GFP expression in HepG2 cells fifteen (15) days post-infection as measured by flow cytometry. Notably, the population of GFP positive cells increased in its frequency.

[0030] FIG. 7: Plate Reader Measurement of GFP Secretion in HepG2 Cells Fifteen (15) Days Post-Treatment. Fourteen (14) days after infection, cell media was replaced to Opti-MEM® to reduce autofluorescence and at Day 15 cell media was collected to measure GFP fluorescence. In all HDR positive conditions, GFP fluorescence was above the background of the non-treated (NT) cells.

[0031] FIG. 8: GFP integration following editing after electroporation as measured by flow cytometry detection of GFP expression eight (8) days post-treatment. HepG2 cells were electroporated with an RNP comprising a OMNI-50 nuclease and a guide (C3 g11), and infected with AAV containing a GFP HDR template two (2) hours after electroporation. AAV containing a DNA molecule encoding GFP under a constitutive promoter was used as a positive control for infection efficiency evaluation. GFP was detected in cells electroporated with RNP and infected with HDR template. The graph represents average ±standard deviation (n=2) of % GFP positive cells.

[0032] FIG. 9: Plate Reader Measurement of GFP Secretion in HepG2 Cells Eight (8) Days Post-Treatment. Seven (7) days after infection, cell media was replaced to Opti-MEM® to reduce autofluorescence and at Day 8 cell media was collected to measure GFP fluorescence. Non-specific fluorescence in a non-treated (NT) sample was subtracted from all samples.

### DETAILED DESCRIPTION

[0033] Unless otherwise defined, all technical and/or scientific terms used herein have the same meaning as commonly understood by one of ordinary skill in the art to which the invention pertains. Although methods and materials similar or equivalent to those described herein can be used in the practice or testing of embodiments of the invention, exemplary methods and/or materials are described below. In case of conflict, the patent specification, including definitions, will control. In addition, the materials, methods, and examples are illustrative only and are not intended to be necessarily limiting.

[0034] It should be understood that the terms “a” and “an” as used above and elsewhere herein refer to “one or more” of the enumerated components. It will be clear to one of ordinary skill in the art that the use of the singular includes the plural unless specifically stated otherwise. Therefore, the terms “a,” “an” and “at least one” are used interchangeably in this application.

[0035] For purposes of better understanding the present teachings and in no way limiting the scope of the teachings, unless otherwise indicated, all numbers expressing quantities, percentages or proportions, and other numerical values used in the specification and claims, are to be understood as being modified in all instances by the term “about.” Accordingly, unless indicated to the contrary, the numerical parameters set forth in the following specification and attached claims are approximations that may vary depending upon the desired properties sought to be obtained. At the very least, each numerical parameter should at least be construed in light of the number of reported significant digits and by applying ordinary rounding techniques.

[0036] Unless otherwise stated, adjectives such as “substantially” and “about” modifying a condition or relationship characteristic of a feature or features of an embodiment of the invention, are understood to mean that the condition or characteristic is defined to within tolerances that are acceptable for operation of the embodiment for an application for which it is intended. Unless otherwise indicated, the word “or” in the specification and claims is considered to be the inclusive “or” rather than the exclusive or, and indicates at least one of, or any combination of items it conjoins.

[0037] In the description and claims of the present application, each of the verbs, “comprise,” “include” and “have” and conjugates thereof, are used to indicate that the object or objects of the verb are not necessarily a complete listing of components, elements or parts of the subject or subjects of the verb. Other terms as used herein are meant to be defined by their well-known meanings in the art.

[0038] The term “homology-directed repair” or “HDR” refers to a mechanism for repairing DNA damage in cells, for example, during repair of double-stranded and single-stranded breaks in DNA. HDR requires nucleotide sequence homology and uses a “nucleic acid template” (nucleic acid template or donor template used interchangeably herein) to repair the sequence where the double-stranded or single break occurred (e.g., DNA target sequence). This results in the transfer of genetic information from, for example, the nucleic acid template to the DNA target sequence. HDR may result in alteration of the DNA target sequence (e.g., insertion, deletion, mutation) if the nucleic acid template sequence differs from the DNA target sequence and part or all of the nucleic acid template polynucleotide or oligonucleotide is incorporated into the DNA target sequence. In some embodiments, an entire nucleic acid template polynucleotide, a portion of the nucleic acid template polynucleotide, or a copy of the nucleic acid template is integrated at the site of the DNA target sequence.

[0039] The terms “nucleic acid template” and “donor”, refer to a nucleotide sequence that is inserted or copied into a genome. The nucleic acid template comprises a nucleotide sequence, e.g., of one or more nucleotides, that will be added to or will template a change in the target nucleic acid or may be used to modify the target sequence. A nucleic acid template sequence may be of any length, for example between 2 and 10,000 nucleotides in length. A nucleic acid template may be a single stranded nucleic acid, a double stranded nucleic acid. In some embodiments, the nucleic acid template comprises a nucleotide sequence, e.g., of one or more nucleotides, that corresponds to wild type sequence of the target nucleic acid, e.g., of the target position. In some embodiments, the nucleic acid template comprises a nucleotide sequence, e.g., of one or more ribonucleotides, that corresponds to wild type sequence of the target nucleic acid, e.g., of the target position. In some embodiments, the nucleic acid template comprises modified nucleotides.

[0040] Insertion of an exogenous sequence (also called a “donor sequence,” donor template,” “donor molecule” or “donor”) can also be carried out. For example, a donor sequence can contain a non-homologous sequence flanked by two regions of homology to allow for efficient homology directed repair (HDR) at the location of interest. Additionally, donor sequences can comprise a vector molecule containing sequences that are not homologous to the region of interest in cellular chromatin. A donor molecule can contain several, discontinuous regions of homology to cellular chromatin. For example, for targeted insertion of sequences not normally present in a region of interest, said sequences can be present in a donor nucleic acid molecule and flanked by regions of homology to sequence in the region of interest. A donor molecule may be any length, for example ranging from several bases e.g. 10-20 bases to multiple kilobases in length.

[0041] The donor polynucleotide can be DNA or RNA, single-stranded and/or double-stranded and can be introduced into a cell in linear or circular form. See, e.g., U.S. Patent Publication Nos. 2010/0047805; 2011/0281361; 2011/0207221; and 2019/0330620. See also Anzalone et al. (2019). If introduced in linear form, the ends of the donor sequence can be protected (e.g., from exonucleolytic degradation) by methods known to those of skill in the art. For example, one or more dideoxynucleotide residues are added to the 3′ terminus of a linear molecule and/or self-complementary oligonucleotides are ligated to one or both ends. See, for example, Chang et al. (1987) and Nehls et al. (1996). Additional methods for protecting exogenous polynucleotides from degradation include, but are not limited to, addition of terminal amino group(s) and the use of modified internucleotide linkages such as, for example, phosphorothioates, phosphoramidates, and O-methyl ribose or deoxyribose residues.

[0042] A donor sequence may be an oligonucleotide and be used for targeted alteration of an endogenous sequence. The oligonucleotide may be introduced to the cell on a vector, may be electroporated into the cell, or may be introduced via other methods known in the art. Donor polynucleotides can be introduced as naked nucleic acid, as nucleic acid complexed with an agent such as a liposome or poloxamer, or can be delivered by viruses (e.g., adenovirus, AAV, herpesvirus, retrovirus, lentivirus and integrase defective lentivirus (IDLV)).

[0043] As used herein, the term “modified cells” refers to cells in which a double strand break is affected by a complex of an RNA molecule and the CRISPR nuclease as a result of hybridization with the target sequence, i.e. on-target hybridization. The term “modified cells” may further encompass cells in which an edit or modification, including the introduction of an exogenous sequence, was affected following the double strand break.

[0044] This invention provides a modified cell or cells obtained by use of any of the methods described herein. In an embodiment these modified cell or cells are capable of giving rise to progeny cells. In an embodiment these modified cell or cells are capable of giving rise to progeny cells after engraftment. As a non-limiting example, the modified cells may be hematopoietic stem cells (HSCs), or any cell suitable for an allogenic cell transplant or autologous cell transplant. As a non-limiting example, the modified cells may be stem cells, liver cells, hepatocytes, or iPS-derived hepatocytes.

[0045] This invention also provides a composition comprising these modified cells and a pharmaceutically acceptable carrier. Also provided is an in vitro or ex vivo method of preparing this, comprising mixing the cells with the pharmaceutically acceptable carrier.

[0046] As used herein, the term “targeting sequence” or “targeting molecule” refers a nucleotide sequence or molecule comprising a nucleotide sequence that is capable of hybridizing to a specific target sequence, e.g., the targeting sequence has a nucleotide sequence which is at least partially complementary to the sequence being targeted along the length of the targeting sequence. The targeting sequence or targeting molecule may be part of an RNA molecule that can form a complex with a CRISPR nuclease, either alone or in combination with other RNA molecules, with the targeting sequence serving as the targeting portion of the CRISPR complex. When the molecule having the targeting sequence is present contemporaneously with the CRISPR molecule, the RNA molecule, alone or in combination with an additional one or more RNA molecules (e.g. a tracrRNA molecule), is capable of targeting the CRISPR nuclease to the specific target sequence. As non-limiting example, a guide sequence portion of a CRISPR RNA molecule or single-guide RNA molecule may serve as a targeting molecule. Each possibility represents a separate embodiment. A targeting sequence can be custom designed to target any desired sequence.

[0047] The term “targets” as used herein, refers to preferentially hybridizing a targeting sequence of a targeting molecule to a nucleic acid having a targeted nucleotide sequence. It is understood that the term “targets” encompasses variable hybridization efficiencies, such that there is preferential targeting of the nucleic acid having the targeted nucleotide sequence, but unintentional off-target hybridization in addition to on-target hybridization might also occur. It is understood that where an RNA molecule targets a sequence, a complex of the RNA molecule and a CRISPR nuclease molecule targets the sequence for nuclease activity.

[0048] The “guide sequence portion” of an RNA molecule refers to a nucleotide sequence that is capable of hybridizing to a specific target DNA sequence, e.g., the guide sequence portion has a nucleotide sequence which is partially or fully complementary to the DNA sequence being targeted along the length of the guide sequence portion. In some embodiments, the guide sequence portion is 17, 18, 19, 20, 21, 22, 23, 24, 25, 26, 27, 28, 29, 30, 31, 32, 33, 34, 35, 36, 37, 38, 39, 40, 41, 42, 43, 44, 45, 46, 47, 48, 49 or 50 nucleotides in length, or approximately 17-50, 17-49, 17-48, 17-47, 17-46, 17-45, 17-44, 17-43, 17-42, 17-41, 17-40, 17-39, 17-38, 17-37, 17-36, 17-35, 17-34, 17-33, 17-31, 17-30, 17-29, 17-28, 17-27, 17-26, 17-25, 17-24, 17-22, 17-21, 18-25, 18-24, 18-23, 18-22, 18-21, 19-25, 19-24, 19-23, 19-22, 19-21, 19-20, 20-22, 18-20, 20-21, 21-22, or 17-20 nucleotides in length. Preferably, the entire length of the guide sequence portion is fully complementary to the DNA sequence being targeted along the length of the guide sequence portion. The guide sequence portion may be part of an RNA molecule that can form a complex with a CRISPR nuclease with the guide sequence portion serving as the DNA targeting portion of the CRISPR complex. When the RNA molecule having the guide sequence portion is present contemporaneously with the CRISPR molecule, alone or in combination with an additional one or more RNA molecules (e.g. a tracrRNA molecule), the RNA molecule is capable of targeting the CRISPR nuclease to the specific target DNA sequence. Accordingly, a CRISPR complex can be formed by direct binding of the RNA molecule having the guide sequence portion to a CRISPR nuclease or by binding of the RNA molecule having the guide sequence portion and an additional one or more RNA molecules to the CRISPR nuclease. Each possibility represents a separate embodiment. A guide sequence portion can be custom designed to target any desired sequence. Accordingly, a molecule comprising a “guide sequence portion” is a type of targeting molecule. In some embodiments, the guide sequence portion comprises a sequence that is the same as, or differs by no more than 1, 2, 3, 4, or 5 nucleotides from, a guide sequence portion described herein, e.g., a guide sequence set forth in any of SEQ ID NOs:1-7,046. Each possibility represents a separate embodiment. In some of these embodiments, the guide sequence portion comprises a sequence that is the same as a sequence set forth in any of SEQ ID NOs:1-7,046. Throughout this application, the terms “guide molecule,” “RNA guide molecule,” “guide RNA molecule,” and “gRNA molecule” are synonymous with a molecule comprising a guide sequence portion.

[0049] The term “non-discriminatory” as used herein refers to a guide sequence portion of an RNA molecule that targets a specific DNA sequence that is common in both alleles of a gene. For example, a non-discriminatory guide sequence portion is capable of targeting both alleles of a gene present in a cell.

[0050] In embodiments of the present invention, an RNA molecule comprises a guide sequence portion having 17-50 contiguous nucleotides containing nucleotides in the sequence set forth in any one of SEQ ID NOs: 1-7,046.

[0051] The RNA molecule and or the guide sequence portion of the RNA molecule may contain modified nucleotides. Exemplary modifications to nucleotides or polynucleotides may be synthetic and encompass polynucleotides which contain nucleotides comprising bases other than the naturally occurring adenine, cytosine, thymine, uracil, or guanine bases. Modifications to polynucleotides include polynucleotides which contain synthetic, non-naturally occurring nucleosides e.g., locked nucleic acids. Modifications to polynucleotides may be utilized to increase or decrease stability of an RNA. An example of a modified polynucleotide is an mRNA containing 1-methyl pseudo-uridine. For examples of modified polynucleotides and their uses, see U.S. Pat. No. 8,278,036, PCT International Publication No. WO/2015/006747, and Weissman and Kariko (2015), each of which is hereby incorporated by reference.

[0052] As used herein, “contiguous nucleotides” set forth in a SEQ ID NO refers to nucleotides in a sequence of nucleotides in the order set forth in the SEQ ID NO without any intervening nucleotides.

[0053] In embodiments of the present invention, the guide sequence portion may be 25 nucleotides in length and contain 20-22 contiguous nucleotides in the sequence set forth in any one of SEQ ID NOs: 1-7,046. In embodiments of the present invention, the guide sequence portion may be less than 22 nucleotides in length. For example, in embodiments of the present invention the guide sequence portion may be 17, 18, 19, 20, or 21 nucleotides in length. In such embodiments the guide sequence portion may consist of 17, 18, 19, 20, or 21 nucleotides, respectively, in the sequence of 17-22 contiguous nucleotides set forth in any one of SEQ ID NOs: 1-7,046. For example, a guide sequence portion having 17 nucleotides in the sequence of 17 contiguous nucleotides set forth in SEQ ID NO: 7,047 may consist of any one of the following nucleotide sequences (nucleotides excluded from the contiguous sequence are marked in strike-through):

(SEQ ID NO: 7,047)
AAAAAAAUGUACUUGGUUCC
17 nucleotide guide sequence 1:
(SEQ ID NO: 7,048) [symbol]
AAAAUGUACUUGGUUCC
17 nucleotide guide sequence 2:
(SEQ ID NO: 7,049) [symbol]
AAAAAUGUACUUGGUUC [symbol]
17 nucleotide guide sequence 3:
(SEQ ID NO: 7,050) [symbol]
AAAAAAUGUACUUGGUU [symbol]
17 nucleotide guide sequence 4:
(SEQ ID NO: 7,051)
AAAAAAAUGUACUUGGU

[symbol]

[0054] In embodiments of the present invention, the guide sequence portion may be greater than 20 nucleotides in length. For example, in embodiments of the present invention the guide sequence portion may be 21, 22, 23, 24, 25, 26, 27, 28, 29, or 30 nucleotides in length. In such embodiments the guide sequence portion comprises 17-50 nucleotides containing the sequence of 20, 21 or 22 contiguous nucleotides set forth in any one of SEQ ID NOs: 1-7,046 and additional nucleotides fully complimentary to a nucleotide or sequence of nucleotides adjacent to the 3′ end of the target sequence, 5′ end of the target sequence, or both.

[0055] In embodiments of the present invention a CRISPR nuclease and an RNA molecule comprising a guide sequence portion form a CRISPR complex that binds to a target DNA sequence to effect cleavage of the target DNA sequence. CRISPR nucleases, e.g. Cpf1, may form a CRISPR complex comprising a CRISPR nuclease and RNA molecule without a further tracrRNA molecule. Alternatively, CRISPR nucleases, e.g. Cas9, may form a CRISPR complex between the CRISPR nuclease, an RNA molecule, and a tracrRNA molecule. A guide sequence portion, which comprises a nucleotide sequence that is capable of hybridizing to a specific target DNA sequence, and a sequence portion that participates in CRIPSR nuclease binding, e.g. a tracrRNA sequence portion, can be located on the same RNA molecule. Alternatively, a guide sequence portion may be located on one RNA molecule and a sequence portion that participates in CRIPSR nuclease binding, e.g. a tracrRNA portion, may located on a separate RNA molecule. A single RNA molecule comprising a guide sequence portion (e.g. a DNA-targeting RNA sequence) and at least one CRISPR protein-binding RNA sequence portion (e.g. a tracrRNA sequence portion), can form a complex with a CRISPR nuclease and serve as the DNA-targeting molecule. In some embodiments, a first RNA molecule comprising a DNA-targeting RNA portion, which includes a guide sequence portion, and a second RNA molecule comprising a CRISPR protein-binding RNA sequence interact by base pairing to form an RNA complex that targets the CRISPR nuclease to a DNA target site or, alternatively, are fused together to form an RNA molecule that complexes with the CRISPR nuclease and targets the CRISPR nuclease to a DNA target site.

[0056] In embodiments of the present invention, an RNA molecule comprising a guide sequence portion may further comprise the sequence of a tracrRNA molecule. Such embodiments may be designed as a synthetic fusion of the guide portion of the RNA molecule and the trans-activating crRNA (tracrRNA). (See Jinek et al., 2012). In such an embodiment, the RNA molecule is a single-guide RNA (sgRNA) molecule. Embodiments of the present invention may also form CRISPR complexes utilizing a separate tracrRNA molecule and a separate RNA molecule comprising a guide sequence portion. In such embodiments the tracrRNA molecule may hybridize with the RNA molecule via basepairing and may be advantageous in certain applications of the invention described herein.

[0057] The term “tracr mate sequence” refers to a sequence sufficiently complementary to a tracrRNA molecule so as to hybridize to the tracrRNA via basepairing and promote the formation of a CRISPR complex. (See U.S. Pat. No. 8,906,616). In embodiments of the present invention, the RNA molecule may further comprise a portion having a tracr mate sequence.

[0058] A “gene,” for the purposes of the present disclosure, includes a DNA region encoding a gene product, as well as all DNA regions which regulate the production of the gene product, whether or not such regulatory sequences are adjacent to coding and/or transcribed sequences. Accordingly, a gene includes, but is not necessarily limited to, promoter sequences, terminators, translational regulatory sequences such as ribosome binding sites and internal ribosome entry sites, enhancers, silencers, insulators, boundary elements, replication origins, matrix attachment sites and locus control regions.

[0059] “Eukaryotic” cells include, but are not limited to, fungal cells (such as yeast), plant cells, animal cells, mammalian cells and human cells.

[0060] The term “nuclease” as used herein refers to an enzyme capable of cleaving the phosphodiester bonds between the nucleotide subunits of nucleic acid. A nuclease may be isolated or derived from a natural source. The natural source may be any living organism. Alternatively, a nuclease may be a modified or a synthetic protein which retains the phosphodiester bond cleaving activity. Gene modification can be achieved using a nuclease, for example a CRISPR nuclease.

[0061] According to embodiments of the present invention, there is provided an RNA molecule comprising a guide sequence portion (e.g. a targeting sequence) comprising a nucleotide sequence that is fully or partially complementary to a target sequence comprising a SNP position (REF/SNP sequence) located in or near an allele of the C3 gene. In some embodiments, the guide sequence portion of the RNA molecule consists of 16, 17, 18, 19, 20, 21, 22, 23, 24, 25, 26, or more than 26 nucleotides. In some embodiments the guide sequence portion is configured to target a CRISPR nuclease to a target sequence and provide a cleavage event, by a CRISPR nuclease complexed therewith, selected from a double-strand break and a single-strand break within 500, 400, 300, 200, 100, 50, 25, or 10 nucleotides of a C3 target site. In some embodiments, the RNA molecule is a guide RNA molecule such as a crRNA molecule or a single-guide RNA molecule

[0062] As used herein, the term “HSC” refers to both hematopoietic stem cells and hematopoietic stem progenitor cells. Non-limiting examples of stem cells include bone marrow cells, myeloid progenitor cells, a multipotent progenitor cells, and lineage restricted progenitor cells.

[0063] As used herein, “progenitor cell” refers to a lineage cell that is derived from stem cell and retains mitotic capacity and multipotency (e.g., can differentiate or develop into more than one but not all types of mature lineage of cell). As used herein “hematopoiesis” or “hemopoiesis” refers to the formation and development of various types of blood cells (e.g., red blood cells, megakaryocytes, myeloid cells (e.g., monocytes, macrophages and neutrophil), and lymphocytes) and other formed elements in the body (e.g., in the bone marrow).

[0064] The term “single nucleotide polymorphism (SNP) position”, as used herein, refers to a position in which a single nucleotide DNA sequence variation occurs between members of a species, or between paired chromosomes in an individual. In the case that a SNP position exists at paired chromosomes in an individual, a SNP on one of the chromosomes is a “heterozygous SNP.” The term SNP position refers to the particular nucleic acid position where a specific variation occurs and encompasses both a sequence including the variation from the most frequently occurring base at the particular nucleic acid position (also referred to as “SNP” or alternative “ALT”) and a sequence including the most frequently occurring base at the particular nucleic acid position (also referred to as reference, or “REF”). Accordingly, the sequence of a SNP position may reflect a SNP (i.e. an alternative sequence variant relative to a consensus reference sequence within a population), or the reference sequence itself.

[0065] According to some embodiments of the present invention, there is provided a method for modifying in a cell an allele of the Complement component 3 (C3) gene, the method comprising
[0066] introducing to the cell a composition comprising:
   [0067] at least one CRISPR nuclease or a nucleotide sequence encoding a CRISPR nuclease; and
   [0068] a RNA molecule comprising a guide sequence portion having 17-50 nucleotides or a nucleotide sequence encoding the same,
[0069] wherein a complex of the CRISPR nuclease and the RNA molecule affects a double strand break in the allele of the C3 gene.

[0070] In some embodiments, the composition also comprises a donor molecule. In some embodiments, a sequence of nucleotides from the donor molecule is inserted or copied at or near the double strand break site.

[0071] In some embodiments, the composition further comprises a donor molecule containing a sequence of nucleotides that is introduced at the double strand break site such that the expression of the introduced sequence is mediated by the promoter of the C3 gene.

[0072] In some embodiments, the introduced sequence is a sequence from a ATP7B, A1AT, G6PC, SERPINA, LDLR, TTR, omithine transcarbamylase, argininosuccinic acid synthetase, arginase, argininosuccinase, carbamoyl phosphate synthetase, and N-acetylglutamate synthetase gene.

[0073] In some embodiments, the RNA molecule targets the CRISPR nuclease to a SNP position of a C3 allele.

[0074] In some embodiments, the SNP position is any one of rs17030, rs199713383, and rs35473940.

[0075] In some embodiments, the guide sequence portion of the first RNA molecule comprises 17-50 contiguous nucleotides containing nucleotides in the sequence set forth in any one of SEQ ID NOs: 1-7,046 that targets a SNP position of the C3 allele.

[0076] In some embodiments, the SNP position contains a heterozygous SNP.

[0077] In some embodiments, the SNP position is in an exon or intron of the C3 allele.

[0078] In some embodiments, the RNA molecule comprises a non-discriminatory guide portion that targets both C3 alleles.

[0079] In some embodiments, the RNA molecule comprises a non-discriminatory guide portion that targets any one of a non-discriminatory guide portion that targets Intron 1 of C3 or a 3′ untranslated region (3′ UTR) of C3.

[0080] In some embodiments, the RNA molecule comprises a non-discriminatory guide portion that targets a sequence that is located within a genomic range selected from any one of 19:6677732-6677881 and 19:6719404-6720515.

[0081] the guide sequence portion of the RNA molecule comprises 17-50 contiguous nucleotides containing nucleotides in the sequence set forth in any one of SEQ ID NOs: 1-7,046.

[0082] In some embodiments, the guide sequence portion of the RNA molecule comprises 1, 2, 3, 4, or 5 nucleotide mismatches relative to a fully-complementary C3 target sequence.

[0083] In some embodiments, the guide sequence portion of the RNA molecule comprises 17-50 contiguous nucleotides containing nucleotides in the sequence set forth in any one of SEQ ID NOs: 1-7,046 modified to contain 1, 2, 3, 4, or 5 nucleotide mismatches relative to a fully-complementary C3 target sequence.

[0084] In some embodiments, the guide sequence portion provides higher targeting specificity to the complex of the CRISPR nuclease and the RNA molecule relative to a guide sequence portion that has higher complementarity to an allele of the C3 gene.

[0085] According to embodiments of the present invention, there is provided a modified cell obtained by the method of any one of the embodiments presented herein.

[0086] According to some embodiments, the cell is a stem cell, liver cell, hepatocyte, or iPS-derived hepatocyte.

[0087] According to embodiments of the present invention, there is provided a RNA molecule comprising a guide sequence portion having 17-50 contiguous nucleotides containing nucleotides in the sequence set forth in any one of SEQ ID NOs: 1-7,046.

[0088] According to embodiments of the present invention, there is provided a composition comprising the RNA molecule and at least one CRISPR nuclease.

[0089] In some embodiments, the RNA molecule comprises a guide sequence portion having 17-50 contiguous nucleotides containing nucleotides in the sequence set forth in any one of SEQ ID NOs: 1-7,046, or SEQ ID NOs: 1-7,046 modified to contain 1, 2, 3, 4, or 5 nucleotide mismatches relative to a fully-complementary C3 target sequence.

[0090] In some embodiments, the composition further comprises a donor molecule.

[0091] In some embodiments, the donor molecule contains a sequence from a ATP7B, A1AT, G6PC, SERPINA, LDLR, TTR, ornithine transcarbamylase, argininosuccinic acid synthetase, arginase, argininosuccinase, carbamoyl phosphate synthetase, and N-acetylglutamate synthetase gene.

[0092] According to embodiments of the present invention, there is provided a method for modifying or editing a C3 allele in a cell, the method comprising delivering to the cell the composition of any one of the embodiments presented herein.

[0093] According to embodiments of the present invention, there is provided a method for treating a liver-related disorder, the method comprising delivering to a cell of a subject having a liver-related disorder the composition or delivering to the subject modified cells of any one of the embodiments presented herein.

[0094] According to embodiments of the present invention, there is provided use of any one of the compositions presented herein for modifying or editing a C3 allele in a cell, comprising delivering to the cell the composition of any one of the embodiments presented herein.

[0095] According to embodiments of the present invention, there is provided a medicament comprising the composition of any one of the embodiments presented herein for use in modifying or editing a C3 allele in a cell, wherein the medicament is administered by delivering to the cell the composition of any one of the embodiments presented herein.

[0096] According to embodiments of the present invention, there is provided use of the composition or modified cells of any one of the embodiments presented herein for treating ameliorating or preventing a liver-related disorder, comprising delivering to a cell of a subject having or at risk of having a liver-related disorder the composition of any one of the embodiments presented herein or delivering to the subject a cell modified by any one of the methods presented herein.

[0097] According to embodiments of the present invention, there is provided a medicament comprising the composition of any one of the embodiments presented herein for use in treating ameliorating or preventing a liver-related disorder, wherein the medicament is administered by delivering to a cell of a subject having or at risk of having a liver-related disorder the composition of any one of the embodiments presented herein.

[0098] According to embodiments of the present invention, there is provided a kit for modifying or editing a C3 allele in a cell, comprising an RNA molecule of any one of the embodiments presented herein, a CRISPR nuclease, and/or a tracrRNA molecule; and instructions for delivering the RNA molecule; CRISPR nuclease, and/or the tracrRNA to the cell. In some embodiments, the kit further comprises a donor molecule and instructions for delivering the donor molecule to a cell.

[0099] According to embodiments of the present invention, there is provided a kit for treating a liver-related disorder in a subject, comprising an RNA molecule of any one of the embodiments presented herein, a CRISPR nuclease, and/or a tracrRNA molecule; and instructions for delivering the RNA molecule; CRISPR nuclease, and/or the tracrRNA to a cell of a subject having or at risk of having a liver-related disorder. In some embodiments, the kit further comprises a donor molecule and instructions for delivering the donor molecule to a cell.

[0100] According to embodiments of the present invention, there is provided a gene editing composition comprising an RNA molecule comprising a guide sequence portion having 17-50 contiguous nucleotides containing nucleotides in the sequence set forth in any one of SEQ ID NOs: 1-7,046. In some embodiments, the RNA molecule further comprises a portion having a sequence which binds to a CRISPR nuclease. In some embodiments, the sequence which binds to a CRISPR nuclease is a tracrRNA sequence.

[0101] In some embodiments, the RNA molecule further comprises a portion having a tracr mate sequence.

[0102] In some embodiments, the RNA molecule may further comprise one or more linker portions.

[0103] According to embodiments of the present invention, an RNA molecule may be up to 1000, 900, 800, 700, 600, 500, 450, 400, 350, 300, 290, 280, 270, 260, 250, 240, 230, 220, 210, 200, 190, 180, 170, 160, 150, 140, 130, 120, 110, or 100 nucleotides in length. Each possibility represents a separate embodiment. In embodiments of the present invention, the RNA molecule may be 17 up to 300 nucleotides in length, 100 up to 300 nucleotides in length, 150 up to 300 nucleotides in length, 100 up to 500 nucleotides in length, 100 up to 400 nucleotides in length, 200 up to 300 nucleotides in length, 100 to 200 nucleotides in length, or 150 up to 250 nucleotides in length. Each possibility represents a separate embodiment.

[0104] According to some embodiments of the present invention, the composition further comprises a tracrRNA molecule.

[0105] According to some embodiments of the present invention, there is provided a method for modifying or editing a C3 allele in a cell, the method comprising delivering to the cell a composition comprising an RNA molecule comprising a guide sequence portion having 17-50 contiguous nucleotides containing nucleotides in the sequence set forth in any one of SEQ ID NOs: 1-7,046 and a CRISPR nuclease. In some embodiments, the composition further comprises a donor molecule.

[0106] According to some embodiments of the present invention, there is provided a method for treating a disorder, the method comprising delivering to a cell of a subject having the disorder a composition comprising an RNA molecule comprising a guide sequence portion having 17-50 contiguous nucleotides containing nucleotides in the sequence set forth in any one of SEQ ID NOs: 1-7,046 and a CRISPR nuclease. In some embodiments, the composition further comprises a donor molecule. In some embodiments, the disorder is a liver-related disorder. In some embodiments, the disorder is a lysosomal storage disorder.

[0107] According to some embodiments of the present invention, there is provided a method for modifying a DNA target site in a liver cell of a subject, wherein the modification of the DNA target site induces the liver cell to secrete a desired protein encoded by the modification, the method comprising delivering to the cell of the subject a composition comprising an RNA molecule comprising a guide sequence portion having 17-50 contiguous nucleotides containing nucleotides in the sequence set forth in any one of SEQ ID NOs: 1-7,046 and a CRISPR nuclease. In some embodiments, the composition further comprises a donor molecule.

[0108] According to embodiments of the present invention, at least one CRISPR nuclease and the RNA molecule or RNA molecules are delivered to the subject and/or cells substantially at the same time or at different times.

[0109] In some embodiments, a tracrRNA molecule is delivered to the subject and/or cells substantially at the same time or at different times as the CRISPR nuclease and RNA molecule or RNA molecules.

[0110] According to embodiments of the present invention, the RNA molecule targets a SNP in an exon, a SNP in an intron, a SNP in the first intron that follows the first coding exon of the C3 gene, a sequence common to both alleles in an intron, a sequence common to both alleles in the first intron that follows the first coding exon of the C3 gene, a SNP in the promoter region, the start codon, the stop codon, or an untranslated region (UTR), or a sequence present in both C3 alleles.

[0111] According to embodiments of the present invention, the RNA molecule targets an alternative splicing signal sequence between an exon and an intron of a C3 allele.

[0112] According to embodiments of the present invention, the RNA molecule is non-discriminatory and targets a sequence present in both C3 alleles. In some embodiments, the sequence is present in both C3 alleles. In some embodiments, the sequence is present in an intron of the C3 gene. In some embodiments, the intron is the first intron that follows the first coding exon of the C3 gene.

[0113] The compositions and methods of the present disclosure may be utilized for treating, preventing, ameliorating, or slowing progression of a disorder, such as a genetic disorder. For example, non-limiting examples of such a disorder is a liver-related disorder or a lysosomal storage disorder.

[0114] Any one of, or combination of, the above-mentioned strategies for modifying or editing a C3 allele may be used in the context of the invention.

[0115] According to some embodiments, the present disclosure provides an RNA sequence (also referred to as an ‘RNA molecule’) which binds to or associates with and/or directs an RNA-guided DNA nuclease e.g., a CRISPR nuclease, to a target sequence comprising at least one nucleotide which differs between alleles (e.g., SNP) of a gene of interest (e.g., a sequence of one C3 allele which is not present in the other C3 allele).

[0116] In some embodiments, the method comprises contacting at least one allele of a gene of interest with a non-discriminatory RNA molecule, e.g. an RNA molecule comprising a guide sequence portion which is capable of targeting both alleles of a gene, and a CRISPR nuclease e.g., a Cas9 protein, wherein the non-discriminatory RNA molecule and the CRISPR nuclease associate with a nucleotide sequence of the at least one allele of the gene of interest, thereby modifying or editing the at least one allele. Notably, although biallelic cleavage may occur upon introduction of a non-discriminatory RNA molecule to a cell, insertion of a nucleotide sequence at a cleavage site may occur in only a single allele and not in both alleles. Accordingly, inducing biallelic cleavage with a non-discriminatory RNA molecule that targets an intron of the C3 gene may result in preservation of expression of an endogenous C3 gene from one allele and introduction of a nucleotide sequence, e.g. a nucleotide sequence from a donor molecule, in the other allele. Introduction of the nucleotide sequence in a C3 allele may or may not disrupt expression of the C3 encoded gene product at the C3 allele.

[0117] In some embodiments, the method comprises contacting an allele of a gene of interest with an allele-specific RNA molecule and a CRISPR nuclease e.g., a Cas9 protein, wherein the allele-specific RNA molecule and the CRISPR nuclease associate with a nucleotide sequence of the allele of the gene of interest which differs by at least one nucleotide from a nucleotide sequence of a different allele of the gene of interest, thereby modifying or editing the targeted allele.

[0118] In some embodiments, the allele-specific or non-discriminatory RNA molecule and a CRISPR nuclease is introduced to a cell encoding the gene of interest. In some embodiments, the cell encoding the gene of interest is in a mammalian subject.

[0119] In some embodiments, the RNA molecule targets a SNP which is highly prevalent in the population and exists in at least one C3 allele of an individual subject to be treated.

[0120] In some embodiments, the SNP is within an exon of the gene of interest. In such embodiments, a guide sequence portion of an RNA molecule is designed to associate with a sequence of an exon of the gene of interest.

[0121] In some embodiments, SNP is within an intron or the exon of the gene of interest. In some embodiments, the SNP is in close proximity to the splice site between an intron and an exon. In some embodiments, the close proximity to a splice site is 1, 2, 3, 4, 5, 6, 7, 8, 9, 10, 11, 12, 13, 14, 15, 16, 17, 18, 19, or 20 nucleotides upstream or downstream to the splice site. Each possibility represents a separate embodiment of the present invention. In such embodiments, a guide sequence portion of an RNA molecule may be designed to associate with a sequence of the gene of interest which comprises the splice site.

[0122] In some embodiments, methods of the disclosed invention are utilized for treating a subject having a disorder or disease. In such embodiments, the method results in improvement, amelioration, or prevention of the disease phenotype. In some embodiments, the disease or disorder is a liver-related disorder. In some embodiments, the disease or disorder is a lysosomal storage disorder.

[0123] Embodiments of compositions described herein include at least one CRISPR nuclease, RNA molecule(s) comprising a guide sequence portion, and a tracrRNA molecule, which may be separate or attached to an RNA molecule comprising a guide sequence portion, being effective in a subject or cells at the same time. The at least one CRISPR nuclease, RNA molecule(s) comprising a guide sequence portion, and tracrRNA may be delivered substantially at the same time or can be delivered at different times but have effect at the same time. For example, this includes delivering the CRISPR nuclease to the subject or cells before the RNA molecule comprising a guide sequence portion and/or tracrRNA is substantially extant in the subject or cells.

[0124] In some embodiments, the cell is a stem cell. In some embodiments, the cell is a liver cell. In some embodiments, the cell is a hepatocyte. In some embodiments, the cell is an iPS-derived hepatocyte.

### Genetic C3 Safe Harbor Knock-Ins to Treat Liver-Related Disorders

[0125] In some embodiments, methods of the present invention may be used to knock-in a sequence at a C3 safe harbor site, with C3-mediated expression of the knocked-in sequence being involved in or associated with treatment of a disorder or a disease.

[0126] As a non-limiting example, expression of the knocked-in sequence may be involved in or associated with treatment of a liver-related disorder. For example, the knocked in sequence may be a ATP7B, A1AT, G6PC, SERPINA, LDLR, TTR, ornithine transcarbamylase, argininosuccinic acid synthetase, arginase, argininosuccinase, carbamoyl phosphate synthetase, or N-acetylglutamate synthetase sequence, or a portion thereof.

[0127] In another example, a C3 DNA target site in a liver cell is modified such that the liver cell expresses and secretes a protein product encoded by the modification. These modified liver cells may be utilized, for example, to treat lysosomal storage diseases or other disorders. Accordingly, these modified cells serve as an alternative to traditional enzyme replacement therapies. As a non-limiting example, a liver cell may be modified to express Alpha Galactosidase A, Coagulation Factor IX, Coagulation Factor VII, Lysosomal Alpha Glucosidase, Fibrinogen, Phenylalanine 4 Hydroxylase, Alkaline Phosphatase, Glucosylceramidase, Beta Galactosidase, Porphobilinogen Deaminase, Arylsulfatase B, Beta Glucuronidase, Alpha N Acetylglucosaminidase, Lysosomal Alpha, Alpha L-Iduronidase, Mannosidase, Phosphatidylcholine Sterol Acyltransferase, N-Sulphoglucosamine Sulphohydrolase, Coagulation Factor X, N-Acetylgalactosamine-6-Sulfatase, Sphingomyelin Phosphodiesterase, A1AT, Iduronate-2-Sulfatase, Lysosomal Alpha Glucosidase, Cyclin Dependent Kinase Like 5, Prolow Density Lipoprotein Receptor Related Protein 1, Phenylalanine Ammonia Lyase, Protein Glutamine Gamma Glutamyltransferase K, Lysosomal Protective Protein, or a portion thereof.

[0128] C3 editing strategies include strategies that enable expression of a desired sequence under the control of a C3 promoter, optionally without knocking out the edited C3 alleles. This can be achieved by the following strategies: (1) knock-in in the first intron of a C3 allele, or the first intron that follows the first coding exon of the C3 allele; (2) allele-specific knock-in in the first intron of a C3 allele, or the first intron that follows the first coding exon of the C3 allele; (3) knock-in by replacement of the stop codon of a C3 allele; or (4) knock-in by replacing the stop codon of a C3 allele in an allele-specific manner.

### CRISPR Nucleases and PAM Recognition

[0129] In some embodiments, the sequence specific nuclease is selected from CRISPR nucleases, or a functional variant thereof. In some embodiments, the sequence specific nuclease is an RNA-guided DNA nuclease. In such embodiments, the RNA sequence which guides the RNA guided DNA nuclease (e.g., Cpf1) binds to and/or directs the RNA guided DNA nuclease to a target sequence comprising at least one nucleotide which differs between alleles of a C3 gene (e.g., SNP). In some embodiments, the CRISPR complex does not further comprise a tracrRNA. In a non-limiting example, in which the RNA guided DNA nuclease is a CRISPR protein, the at least one nucleotide which differs between C3 alleles may be within the PAM site and/or proximal to the PAM site within the region that the RNA molecule is designed to hybridize to. A skilled artisan will appreciate that RNA molecules can be engineered to bind to a target of choice in a genome by commonly known methods in the art.

[0130] The term “PAM” as used herein refers to a nucleotide sequence of a target DNA located in proximity to the targeted DNA sequence and recognized by the CRISPR nuclease complex. The PAM sequence may differ depending on the nuclease identity. In addition, there are CRISPR nucleases that can target almost all PAMs. In some embodiments of the present invention, a CRISPR system utilizes one or more RNA molecules having a guide sequence portion to direct a CRISPR nuclease to a target DNA site via Watson-Crick base-pairing between the guide sequence portion and the protospacer on the target DNA site, which is next to the protospacer adjacent motif (PAM), which is an additional requirement for target recognition. The CRISPR nuclease then mediates cleavage of the target DNA site to create a double-stranded break within the protospacer. In a non-limiting example, a type II CRISPR system utilizes a mature crRNA:tracrRNA complex that directs the CRISPR nuclease, e.g. Cas9 to the target DNA the target DNA via Watson-Crick base-pairing between the guide sequence portion of the crRNA and the protospacer on the target DNA next to the protospacer adjacent motif (PAM). A skilled artisan will appreciate that each of the engineered RNA molecule of the present invention is further designed such as to associate with a target genomic DNA sequence of interest next to a protospacer adjacent motif (PAM), e.g., a PAM matching the sequence relevant for the type of CRISPR nuclease utilized, such as for a non-limiting example, NGG or NAG, wherein “N” is any nucleobase, for Streptococcus pyogenes Cas9 WT (SpCAS9); NNGRRT for Staphylococcus aureus (SaCas9); NNNVRYM for Jejuni Cas9 WT; NGAN or NGNG for SpCas9-VQR variant; NGCG for SpCas9-VRER variant; NGAG for SpCas9-EQR variant; NRRH for SpCas9-NRRH variant, wherein N is any nucleobase, R is A or G and H is A, C, or T; NRTH for SpCas9-NRTH variant, wherein N is any nucleobase, R is A or G and H is A, C, or T; NRCH for SpCas9-NRCH variant, wherein N is any nucleobase, R is A or G and H is A, C, or T; NG for SpG variant of SpCas9 wherein N is any nucleobase; NG or NA for SpCas9-NG variant of SpCas9 wherein N is any nucleobase; NR or NRN or NYN for SpRY variant of SpCas9, wherein N is any nucleobase, R is A or G and Y is C or T; NNG for Streptococcus canis Cas9 variant (ScCas9), wherein N is any nucleobase; NNNRRT for SaKKH-Cas9 variant of Staphylococcus aureus (SaCas9), wherein N is any nucleobase, and R is A or G; NNNNGATT for Neisseria meningitidis (NmCas9), wherein N is any nucleobase; TTN for Alicyclobacillus acidiphilus Cas12b (AacCas12b), wherein N is any nucleobase; or TTTV for Cpf1, wherein V is A, C or G. RNA molecules of the present invention are each designed to form complexes in conjunction with one or more different CRISPR nucleases and designed to target polynucleotide sequences of interest utilizing one or more different PAM sequences respective to the CRISPR nuclease utilized.

[0131] In some embodiments, an RNA-guided DNA nuclease e.g., a CRISPR nuclease, may be used to cause a DNA break, either double or single-stranded in nature, at a desired location in the genome of a cell. The most commonly used RNA-guided DNA nucleases are derived from CRISPR systems, however, other RNA-guided DNA nucleases are also contemplated for use in the genome editing compositions and methods described herein. For instance, see U.S. Patent Publication No. 2015/0211023, incorporated herein by reference.

[0132] CRISPR systems that may be used in the practice of the invention vary greatly. CRISPR systems can be a type I, a type II, or a type III system. Non-limiting examples of suitable CRISPR proteins include Cas3, Cas4, Cas5, Cas5e (or CasD), Cas6, Cas6e, Cas6f, Cas7, Cas8a1, Cas8a2, Cas8b, Cas8c, Cas9, Cas10, Cas1 Od, CasF, CasG, CasH, Csy1, Csy2, Csy3, Cse1 (or CasA), Cse2 (or CasB), Cse3 (or CasE), Cse4 (or CasC), Csc1, Csc2, Csa5, Csn2, Csm2, Csm3, Csm4, Csm5, Csm6, Cmr1, Cmr3, Cmr4, Cmr5, Cmr6, Csb1, Csb2, Csb3, Csx17, Csx14, Csx10, Csx16, CsaX, Csx3, Csz1, Csx15, Csf1, Csf2, Csf3, Csf4, and Cul966.

[0133] In some embodiments, the RNA-guided DNA nuclease is a CRISPR nuclease derived from a type II CRISPR system (e.g., Cas9). The CRISPR nuclease may be derived from Streptococcus pyogenes, Streptococcus thermophilus, Streptococcus sp., Staphylococcus aureus, Neisseria meningitidis, Treponema denticola, Nocardiopsis dassonvillei, Streptomyces pristinaespiralis, Streptomyces viridochromogenes, Streptomyces viridochromogenes, Streptosporangium roseum, Streptosporangium roseum, Alicyclobacillus acidocaldarius, Bacillus pseudomycoides, Bacillus selenitireducens, Exiguobacterium sibiricum, Lactobacillus delbrueckii, Lactobacillus salivarius, Microscilla marina, Burkholderiales bacterium, Polaromonas naphthalenivorans, Polaromonas sp., Crocosphaera watsonii, Cyanothece sp., Microcystis aeruginosa, Synechococcus sp., Acetohalobium arabaticum, Ammonifex degensii, Caldicelulosiruptor becscii, Candidatus Desulforudis, Clostridium botulinum, Clostridium difjicile, Finegoldia magna, Natranaerobius thermophilus, Pelotomaculumthermopropionicum, Acidithiobacillus caldus, Acidithiobacillusferrooxidans, Allochromatium vinosum, Marinobacter sp., Nitrosococcus halophilus, Nitrosococcus watsoni, Pseudoalteromonas haloplanktis, Ktedonobacter racemifer, Methanohalobium evestigatum, Anabaena variabilis, Nodularia spumigena, Nostoc sp., Arthrospira maxima, Arthrospira platensis, Arthrospira sp., Lyngbya sp., Microcoleus chthonoplastes, Oscillatoria sp., Petrotoga mobilis, Thermosipho africanus, Acaryochloris marina, or any species which encodes a CRISPR nuclease with a known PAM sequence. CRISPR nucleases encoded by uncultured bacteria may also be used in the context of the invention. (See Burstein et al. Nature, 2017). Variants of CRIPSR proteins having known PAM sequences e.g., SpCas9 D1135E variant, SpCas9 VQR variant, SpCas9 EQR variant, or SpCas9 VRER variant may also be used in the context of the invention.

[0134] Thus, an RNA-guided DNA nuclease of a CRISPR system, such as a Cas9 protein or modified Cas9 or homolog or ortholog of Cas9, or other RNA guided DNA nucleases belonging to other types of CRISPR systems, such as Cpf1 and its homologs and orthologs, may be used in the compositions of the present invention. Additional CRISPR nucleases may also be used, for example, the nucleases described in PCT International Application Publication Nos. WO2020/223514 and WO2020/223553, each of which are hereby incorporated by reference.

[0135] In certain embodiments, the CRIPSR nuclease may be a “functional derivative” of a naturally occurring Cas protein. A “functional derivative” of a native sequence polypeptide is a compound having a qualitative biological property in common with a native sequence polypeptide. “Functional derivatives” include, but are not limited to, fragments of a native sequence and derivatives of a native sequence polypeptide and its fragments, provided that they have a biological activity in common with a corresponding native sequence polypeptide. A biological activity contemplated herein is the ability of the functional derivative to hydrolyze a DNA substrate into fragments. The term “derivative” encompasses both amino acid sequence variants of polypeptide, covalent modifications, and fusions thereof. Suitable derivatives of a Cas polypeptide or a fragment thereof include but are not limited to mutants, fusions, covalent modifications of Cas protein or a fragment thereof. Derivatives include, but are not limited to, CRISPR nickases, catalytically inactive or “dead” CRISPR nucleases, and fusion of a CRISPR nuclease or derivative thereof to other enzymes such as base editors or retrotransposons. See for example, Anzalone et al. (2019) and PCT International Application No. PCT/US2020/037560.

[0136] Cas protein, which includes Cas protein or a fragment thereof, as well as derivatives of Cas protein or a fragment thereof, may be obtainable from a cell or synthesized chemically or by a combination of these two procedures. The cell may be a cell that naturally produces Cas protein, or a cell that naturally produces Cas protein and is genetically engineered to produce the endogenous Cas protein at a higher expression level or to produce a Cas protein from an exogenously introduced nucleic acid, which nucleic acid encodes a Cas that is same or different from the endogenous Cas. In some cases, the cell does not naturally produce Cas protein and is genetically engineered to produce a Cas protein.

[0137] In some embodiments, the CRISPR nuclease is Cpf1. Cpf1 is a single RNA-guided endonuclease which utilizes a T-rich protospacer-adjacent motif Cpf1 cleaves DNA via a staggered DNA double-stranded break. Two Cpf1 enzymes from Acidaminococcus and Lachnospiraceae have been shown to carry out efficient genome-editing activity in human cells. (See Zetsche et al., 2015).

[0138] Thus, an RNA-guided DNA nuclease of a Type II CRISPR System, such as a Cas9 protein or modified Cas9 or homologs, orthologues, or variants of Cas9, or other RNA guided DNA nucleases belonging to other types of CRISPR systems, such as Cpf1 and its homologs, orthologues, or variants, may be used in the present invention.

[0139] In some embodiments, the guide molecule comprises one or more chemical modifications which imparts a new or improved property (e.g., improved stability from degradation, improved hybridization energetics, or improved binding properties with an RNA guided DNA nuclease). Suitable chemical modifications include, but are not limited to: modified bases, modified sugar moieties, or modified inter-nucleoside linkages. Non-limiting examples of suitable chemical modifications include: 4-acetylcytidine, 5-(carboxyhydroxymethyl)uridine, 2′-O-methylcytidine, 5-carboxymethylaminomethyl-2-thiouridine, 5-carboxymethylaminomethyluridine, dihydrouridine, 2′-O-methylpseudouridine, “beta, D-galactosylqueuosine”, 2′-O-methylguanosine, inosine, N6-isopentenyladenosine, 1-methyladenosine, 1-methylpseudouridine, 1-methylguanosine, 1-methylinosine, “2,2-dimethylguanosine”, 2-methyladenosine, 2-methylguanosine, 3-methylcytidine, 5-methylcytidine, N6-methyladenosine, 7-methylguanosine, 5-methylaminomethyluridine, 5-methoxyaminomethyl-2-thiouridine, “beta, D-mannosylqueuosine”, 5-methoxycarbonylmethyl-2-thiouridine, 5-methoxycarbonylmethyluridine, 5-methoxyuridine, 2-methylthio-N6-isopentenyladenosine, N-((9-beta-D-ribofuranosyl-2-methylthiopurine-6-yl)carbamoyl)threonine, N-((9-beta-D-ribofuranosylpurine-6-yl)N-methylcarbamoyl)threonine, uridine-5-oxyacetic acid-methylester, uridine-5-oxyacetic acid, wybutoxosine, queuosine, 2-thiocytidine, 5-methyl-2-thiouridine, 2-thiouridine, 4-thiouridine, 5-methyluridine, N-((9-beta-D-ribofuranosylpurine-6-yl)-carbamoyl)threonine, 2′-O-methyl-5-methyluridine, 2-O-methyluridine, wybutosine, “3-(3-amino-3-carboxy-propyl)uridine, (acp3)u”, 2′-0-methyl (M), 3′-phosphorothioate (MS), 3′-thioPACE (MSP), pseudouridine, or 1-methyl pseudo-uridine. Each possibility represents a separate embodiment of the present invention.

Guide Sequences which Target a C3 Allele

[0140] Any given RNA molecule comprising a guide sequence portion utilized to target a DNA site may result in degradation of the RNA molecule, limited activity, no activity, or off-target effects. Accordingly, suitable guide sequence portions are necessary for targeting a given DNA site in a gene.

[0141] By the present invention, a novel set of guide sequence portions have been identified for targeting at least one C3 allele, introducing to the at least one allele a sequence of nucleotides to be expressed under the control of the C3 promoter, and thereby treating a disorder or disease. Preferably, a non-discriminatory RNA molecule capable of targeting both C3 alleles is used for targeting.

[0142] However, RNA molecules capable of targeting a specific C3 allele are also contemplated. For example, a guide sequence portion of an RNA molecule may target a specific SNP present in one C3 allele. Notably, a given gene may contain thousands of SNPs. Utilizing a twenty-five base pair target window for targeting each SNP in a gene would require hundreds of thousands of guide sequences.

[0143] The present disclosure provides guide sequence portions capable of specifically targeting a C3 allele. In some embodiments the C3 allele is targeted while leaving the other non-targeted C3 allele unmodified. Some guide sequences of the present invention are designed to, and are most likely to, specifically differentiate between C3 alleles. In some embodiments, both C3 alleles are targeted. Of all possible guide sequences which target a C3 sequence, the specific guide sequences disclosed herein are specifically effective to function with the disclosed embodiments.

[0144] Briefly, the guide sequences may have properties as follows: (1) target SNP/insertion/deletion/indel with a high prevalence in the general population, in a specific ethnic population or in a patient population is above 1% and the SNP/insertion/deletion/indel heterozygosity rate in the same population is above 1%; and (2) target a location of a SNP/insertion/deletion/indel proximal to a portion of the gene e.g., within 5 k bases of any portion of the gene, for example, a promoter, a UTR, an exon or an intron. In some embodiments, the prevalence of the SNP/insertion/deletion/indel in the general population, in a specific ethnic population or in a patient population is above 1%, 2%, 3%, 4%, 5%, 6%, 7%, 8%, 9%, 10%, 11%, 12%, 13%, 14%, or 15% and the SNP/insertion/deletion/indel heterozygosity rate in the same population is above 1%, 2%, 3%, 4%, 5%, 6%, 7%, 8%, 9%, 10%, 11%, 12%, 13%, 14%, or 15%. Each possibility represents a separate embodiment and may be combined at will.

[0145] In some embodiments of the present invention, an RNA molecule is used to target a site in the C3 gene to introduce, or knock-in, an exogenous sequence of nucleotides into the C3 gene. In some embodiments, the site is a SNP position. In some embodiments, the location of the site is near the intended knock-in site, preferably near the start codon or the stop codon, preferably within 150 basepairs of the start codon or stop codon. In some embodiments, the site is located within the first intron that follows the first coding exon of a targeted C3 allele or alleles. In some embodiments, the site is located within intron 1 of a targeted C3 allele.

[0146] A guide sequence portion of the present invention may: (1) target a heterozygous SNP for the targeted C3 gene; (2) target a position (common sequence or a SNP) upstream or downstream of the gene; (3) target a SNP with a prevalence of the SNP/insertion/deletion/indel in the general population, in a specific ethnic population, or in a patient population above 1%; (4) have a guanine-cytosine content of greater than 30% and less than 85%; (5) have no repeat of seven or more thymine/uracil, guanine, cytosine, or adenine; and (6) have no additional target in the genome with zero mismatch with the same PAM sequence. Guide sequences of the present invention may satisfy any one of the above criteria and are most likely to differentiate between a targeted allele from its corresponding non-targeted allele.

### Delivery to Cells

[0147] The compositions described herein may be delivered to a target cell by any suitable means. Compositions of the present invention may be targeted to any cell which contains and/or expresses a C3 allele, including any mammalian cell, preferably a liver cell. For example, in one embodiment an RNA molecule that specifically targets a C3 allele is delivered to a target cell and the target cell is an HSC, hepatocyte, or other liver cell. The delivery to the cell may be performed in-vitro, ex-vivo, or in-vivo. Further, the nucleic acid compositions described herein may be delivered as one or more of DNA molecules, RNA molecules, ribonucleoproteins (RNPs), nucleic acid vectors, or any combination thereof.

[0148] In some embodiments, in vivo delivery methods of the compositions described herein include delivery by a lentivirus, adeno-associated virus (AAV) or nanoparticle. In some embodiments, in vivo delivery methods of the compositions described herein include delivery by a lentivirus, adeno-associated virus (AAV) or nanoparticle. The composition may be in the form of an RNP composition. Accordingly, the delivery can be in vivo to liver cells within a subject, for example, a subject suffering from a liver-related disorder.

[0149] In some embodiments, any one of the compositions described herein is delivered to a cell ex-vivo. In some embodiments, the cell is a stem cell. In some embodiments, the cell is a liver cell. In some embodiments, the cell is a hepatocyte. In some embodiments, the cell is an iPS-derived hepatocyte. The composition may be delivered to the cell by any known ex-vivo delivery method, including but not limited to, electroporation, viral transduction, nanoparticle delivery, liposomes, etc. The composition may be in the form of an RNP composition. Additional detailed delivery methods are described throughout this section.

[0150] In some embodiments, option a liver lobe or hepatocyte cells are obtained from a subject, for example, by performing a biopsy. The obtained cells may then be genetically modified by ex vivo delivery of a composition described herein. The modified cells may be re-introduced to the subject by performing a lobe transplantation or hepatocyte transplantation.

[0151] In some embodiments, an RNA molecule of a composition described herein comprises a chemical modification. Non-limiting examples of suitable chemical modifications include 2′-0-methyl (M), 2′-0-methyl, 3′phosphorothioate (MS) or 2′-0-methyl, 3′thioPACE (MSP), pseudouridine, and 1-methyl pseudo-uridine. Each possibility represents a separate embodiment of the present invention.

[0152] Any suitable viral vector system may be used to deliver nucleic acid compositions e.g., the RNA molecule compositions of the subject invention. Conventional viral and non-viral based gene transfer methods can be used to introduce nucleic acids and target tissues. In certain embodiments, nucleic acids are administered for in vivo or ex vivo gene therapy uses. Non-viral vector delivery systems include naked nucleic acid, and nucleic acid complexed with a delivery vehicle such as a liposome or poloxamer. For a review of gene therapy procedures, see Anderson (1992); Nabel & Felgner (1993); Mitani & Caskey (1993); Dillon (1993); Miller (1992); Van Brunt (1988); Vigne (1995); Kremer & Perricaudet (1995); Haddada et al. (1995); and Yu et al. (1994).

[0153] Methods of non-viral delivery of nucleic acids and/or proteins include electroporation, lipofection, microinjection, biolistics, particle gun acceleration, virosomes, liposomes, immunoliposomes, lipid nanoparticles (LNPs), polycation or lipid:nucleic acid conjugates, artificial virions, and agent-enhanced uptake of nucleic acids or can be delivered to plant cells by bacteria or viruses (e.g., Agrobacterium, Rhizobium sp. NGR234, Sinorhizoboiummeliloti, Mesorhizobium loti, tobacco mosaic virus, potato virus X, cauliflower mosaic virus and cassava vein mosaic virus). (See, e.g., Chung et al., 2006). Sonoporation using, e.g., the Sonitron 2000 system (Rich-Mar), can also be used for delivery of nucleic acids. Cationic-lipid mediated delivery of proteins and/or nucleic acids is also contemplated as an in vivo, ex vivo, or in vitro delivery method. (See Zuris et al. (2015); see also Coelho et al. (2013); Judge et al. (2006); and Basha et al. (2011)).

[0154] Non-viral vectors, such as transposon-based systems e.g. recombinant Sleeping Beauty transposon systems or recombinant PiggyBac transposon systems, may also be delivered to a target cell and utilized for transposition of a polynucleotide sequence of a molecule of the composition or a polynucleotide sequence encoding a molecule of the composition in the target cell.

[0155] Additional exemplary nucleic acid delivery systems include those provided by Amaxa.RTM. Biosystems (Cologne, Germany), Maxcyte, Inc. (Rockville, Md.), BTX Molecular Delivery Systems (Holliston, Mass.) and Copernicus Therapeutics Inc., (see, e.g., U.S. Pat. No. 6,008,336). Lipofection is described in e.g., U.S. Pat. Nos. 5,049,386, 4,946,787; and 4,897,355, and lipofection reagents are sold commercially (e.g., Transfectam.TM., Lipofectin.TM. and Lipofectamine.TM. RNAiMAX). Cationic and neutral lipids that are suitable for efficient receptor-recognition lipofection of polynucleotides include those disclosed in PCT International Publication Nos. WO/1991/017424 and WO/1991/016024. Delivery can be to cells (ex vivo administration) or target tissues (in vivo administration).

[0156] The preparation of lipid:nucleic acid complexes, including targeted liposomes such as immunolipid complexes, is well known to one of skill in the art (see, e.g., Crystal, Science (1995); Blaese et al., (1995); Behr et al., (1994); Remy et al. (1994); Gao and Huang (1995); Ahmad and Allen (1992); U.S. Pat. Nos. 4,186,183; 4,217,344; 4,235,871; 4,261,975; 4,485,054; 4,501,728; 4,774,085; 4,837,028; and 4,946,787).

[0157] Additional methods of delivery include the use of packaging the nucleic acids to be delivered into EnGeneIC delivery vehicles (EDVs). These EDVs are specifically delivered to target tissues using bispecific antibodies where one arm of the antibody has specificity for the target tissue and the other has specificity for the EDV. The antibody brings the EDVs to the target cell surface and then the EDV is brought into the cell by endocytosis. Once in the cell, the contents are released (See MacDiarmid et al., 2009).

[0158] Delivery vehicles include, but are not limited to, bacteria, preferably non-pathogenic, vehicles, nanoparticles, exosomes, microvesicles, gene gun delivery, for example, by attachment of a composition to a gold particle which is fired into a cell using via a “gene-gun”, viral vehicles, including but not limited to lentiviruses, AAV, and retroviruses), virus-like particles (VLPs). large VLPs (LVLPs), lentivirus-like particles, transposons, viral vectors, naked vectors, DNA, or RNA, among other delivery vehicles known in the art.

[0159] The delivery of a CRISPR nuclease and/or a polynucleotide encoding the CRIPSR nuclease, and optionally additional nucleotide molecules and/or additional proteins or peptides, may be performed by utilizing a single delivery vehicle or method or a combination of different delivery vehicles or methods. For example, a CRISPR nuclease may be delivered to a cell utilizing an LNP, and a crRNA molecule and tracrRNA molecule may be delivered to the cell utilizing AAV. Alternatively, a CRISPR nuclease may be delivered to a cell utilizing an AAV particle, and a crRNA molecule and tracrRNA molecule may be delivered to the cell utilizing a separate AAV particle, which may be advantageous due to size limitations.

[0160] The use of RNA or DNA viral based systems for viral mediated delivery of nucleic acids take advantage of highly evolved processes for targeting a virus to specific cells in the body and trafficking the viral payload to the nucleus. Viral vectors can be administered directly to patients (in vivo) or they can be used to treat cells in vitro and the modified cells are administered to patients (ex vivo). Conventional viral based systems for the delivery of nucleic acids include, but are not limited to, retroviral, lentivirus, adenoviral, adeno-associated, vaccinia and herpes simplex virus vectors for gene transfer. An RNA virus is may be utilized for delivery of the RNA compositions described herein. Additionally, high transduction efficiencies have been observed in many different cell types and target tissues. Nucleic acid of the invention may be delivered by non-integrating lentivirus. Optionally, RNA delivery with Lentivirus is utilized. Optionally the lentivirus includes mRNA of the nuclease, RNA of the guide. Optionally the lentivirus includes mRNA of the nuclease, RNA of the guide and a donor template. Optionally, the lentivirus includes the nuclease protein, guide RNA. Optionally, the lentivirus includes the nuclease protein, guide RNA and/or a donor template for gene editing via, for example, homology directed repair. Optionally the lentivirus includes mRNA of the nuclease, DNA-targeting RNA, and the tracrRNA. Optionally the lentivirus includes mRNA of the nuclease, DNA-targeting RNA, and the tracrRNA, and a donor template. Optionally, the lentivirus includes the nuclease protein, DNA-targeting RNA, and the tracrRNA. Optionally, the lentivirus includes the nuclease protein, DNA-targeting RNA, and the tracrRNA, and a donor template for gene editing via, for example, homology directed repair.

[0161] As mentioned above, the compositions described herein may be delivered to a target cell using a non-integrating lentiviral particle method, e.g. a LentiFlash® system. Such a method may be used to deliver mRNA or other types of RNAs into the target cell, such that delivery of the RNAs to the target cell results in assembly of the compositions described herein inside of the target cell. See also PCT International Publication Nos. WO/2013/014537, WO/2014/016690, WO/2016/185125, WO/2017/194902, and WO/2017/194903.

[0162] The tropism of a retrovirus can be altered by incorporating foreign envelope proteins, expanding the potential target population of target cells. Lentiviral vectors are retroviral vectors that are able to transduce or infect non-dividing cells and typically produce high viral titers. Selection of a retroviral gene transfer system depends on the target tissue. Retroviral vectors are comprised of cis-acting long terminal repeats with packaging capacity for up to 6-10 kb of foreign sequence. The minimum cis-acting LTRs are sufficient for replication and packaging of the vectors, which are then used to integrate the therapeutic gene into the target cell to provide permanent transgene expression. Widely used retroviral vectors include those based upon murine leukemia virus (MuLV), gibbon ape leukemia virus (GaLV), Simian Immunodeficiency virus (SIV), human immunodeficiency virus (HIV), and combinations thereof (See, e.g., Buchschacher et al. (1992); Johann et al. (1992); Sommerfelt et al. (1990); Wilson et al. (1989); Miller et al. (1991); PCT International Publication No. WO/1994/026877A1).

[0163] At least six viral vector approaches are currently available for gene transfer in clinical trials, which utilize approaches that involve complementation of defective vectors by genes inserted into helper cell lines to generate the transducing agent.

[0164] pLASN and MFG-S are examples of retroviral vectors that have been used in clinical trials (See Dunbar et al., 1995; Kohn et al., 1995; Malech et al., 1997). PA317/pLASN was the first therapeutic vector used in a gene therapy trial (Blaese et al., 1995). Transduction efficiencies of 50% or greater have been observed for MFG-S packaged vectors. (Ellem et al., (1997); Dranoff et al., 1997).

[0165] Packaging cells are used to form virus particles that are capable of infecting a host cell. Such cells include 293 cells, which package adenovirus, AAV, and Psi-2 cells or PA317 cells, which package retrovirus. Viral vectors used in gene therapy are usually generated by a producer cell line that packages a nucleic acid vector into a viral particle. The vectors typically contain the minimal viral sequences required for packaging and subsequent integration into a host (if applicable), other viral sequences being replaced by an expression cassette encoding the protein to be expressed. The missing viral functions are supplied in trans by the packaging cell line. For example, AAV vectors used in gene therapy typically only possess inverted terminal repeat (ITR) sequences from the AAV genome which are required for packaging and integration into the host genome. Viral DNA is packaged in a cell line, which contains a helper plasmid encoding the other AAV genes, namely rep and cap, but lacking ITR sequences. The cell line is also infected with adenovirus as a helper. The helper virus promotes replication of the AAV vector and expression of AAV genes from the helper plasmid. The helper plasmid is not packaged in significant amounts due to a lack of ITR sequences. Contamination with adenovirus can be reduced by, e.g., heat treatment to which adenovirus is more sensitive than AAV. Additionally, AAV can be produced at clinical scale using baculovirus systems (see U.S. Pat. No. 7,479,554).

[0166] In many gene therapy applications, it is desirable that the gene therapy vector be delivered with a high degree of specificity to a particular tissue type. Accordingly, a viral vector can be modified to have specificity for a given cell type by expressing a ligand as a fusion protein with a viral coat protein on the outer surface of the virus. The ligand is chosen to have affinity for a receptor known to be present on the cell type of interest. For example, Han et al. (1995) reported that Moloney murine leukemia virus can be modified to express human heregulin fused to gp70, and the recombinant virus infects certain human breast cancer cells expressing human epidermal growth factor receptor. This principle can be extended to other virus-target cell pairs, in which the target cell expresses a receptor and the virus expresses a fusion protein comprising a ligand for the cell-surface receptor. For example, filamentous phage can be engineered to display antibody fragments (e.g., FAB or Fv) having specific binding affinity for virtually any chosen cellular receptor. Although the above description applies primarily to viral vectors, the same principles can be applied to nonviral vectors. Such vectors can be engineered to contain specific uptake sequences which favor uptake by specific target cells.

[0167] Gene therapy vectors can be delivered in vivo by administration to an individual patient, typically by systemic administration (e.g., intravitreal, intravenous, intraperitoneal, intramuscular, subdermal, or intracranial infusion) or topical application, as described below. Alternatively, vectors can be delivered to cells ex vivo, such as cells explanted from an individual patient (e.g., lymphocytes, bone marrow aspirates, tissue biopsy) or universal donor hematopoietic stem cells, followed by reimplantation of the cells into a patient, optionally after selection for cells which have incorporated the vector. A non-limiting exemplary ex vivo approach may involve removal of tissue (e.g., peripheral blood, bone marrow, and spleen) from a patient for culture, nucleic acid transfer to the cultured cells (e.g., hematopoietic stem cells), followed by grafting the cells to a target tissue (e.g., bone marrow, and spleen) of the patient. In some embodiments, the stem cell or hematopoietic stem cell may be further treated with a viability enhancer.

[0168] Ex vivo cell transfection for diagnostics, research, or for gene therapy (e.g., via re-infusion of the transfected cells into the host organism) is well known to those of skill in the art. In a preferred embodiment, cells are isolated from the subject organism, transfected with a nucleic acid composition, and re-infused back into the subject organism (e.g., patient). Various cell types suitable for ex vivo transfection are well known to those of skill in the art (See, e.g., Freshney, “Culture of Animal Cells, A Manual of Basic Technique and Specialized Applications (6th edition, 2010) and the references cited therein for a discussion of how to isolate and culture cells from patients).

[0169] Suitable cells include, but are not limited to, eukaryotic cells and/or cell lines. Non-limiting examples of such cells or cell lines generated from such cells include COS, CHO (e.g., CHO—S, CHO-K1, CHO-DG44, CHO-DUXB11, CHO-DUKX, CHOK1SV), VERO, MDCK, WI38, V79, B14AF28-G3, BHK, HaK, NSO, SP2/0-Ag14, HeLa, HEK293 (e.g., HEK293-F, HEK293-H, HEK293-T), perC6 cells, any plant cell (differentiated or undifferentiated), as well as insect cells such as Spodopterafugiperda (Sf), or fungal cells such as Saccharomyces, Pichia and Schizosaccharomyces. In certain embodiments, the cell line is a CHO-K1, MDCK or HEK293 cell line. Additionally, primary cells may be isolated and used ex vivo for reintroduction into the subject to be treated following treatment with a guided nuclease system (e.g. CRISPR/Cas). Suitable primary cells include peripheral blood mononuclear cells (PBMC), and other blood cell subsets such as, but not limited to, CD4+ T cells or CD8+ T cells. Suitable cells also include stem cells such as, by way of example, embryonic stem cells, induced pluripotent stem cells, hematopoietic stem cells (CD34+), neuronal stem cells and mesenchymal stem cells.

[0170] In one embodiment, stem cells are used in ex vivo procedures for cell transfection and gene therapy. The advantage to using stem cells is that they can be differentiated into other cell types in vitro, or can be introduced into a mammal (such as the donor of the cells) where they will engraft in the bone marrow. Methods for differentiating CD34+ cells in vitro into clinically important immune cell types using cytokines such a GM-CSF, IFN-gamma, and TNF-alpha are known (as a non-limiting example see, Inaba et al., 1992).

[0171] Stem cells are isolated for transduction and differentiation using known methods. For example, stem cells are isolated from bone marrow cells by panning the bone marrow cells with antibodies which bind unwanted cells, such as CD4+ and CD8+(T cells), CD45+(panB cells), GR-1 (granulocytes), and lad (differentiated antigen presenting cells) (as a non-limiting example, see Inaba et al., 1992). Stem cells that have been modified may also be used in some embodiments.

[0172] Vectors (e.g., retroviruses, liposomes, etc.) containing therapeutic nucleic acid compositions can also be administered directly to an organism for transduction of cells in vivo. Administration is by any of the routes normally used for introducing a molecule into ultimate contact with blood or tissue cells including, but not limited to, injection, infusion, topical application (e.g., eye drops and cream) and electroporation. Suitable methods of administering such nucleic acids are available and well known to those of skill in the art, and, although more than one route can be used to administer a particular composition, a particular route can often provide a more immediate and more effective reaction than another route. According to some embodiments, the composition is delivered via IV injection.

[0173] Vectors suitable for introduction of transgenes into immune cells (e.g., T-cells) include non-integrating lentivirus vectors. See, e.g., U.S. Patent Publication No. 2009/0117617.

[0174] Pharmaceutically acceptable carriers are determined in part by the particular composition being administered, as well as by the particular method used to administer the composition. Accordingly, there is a wide variety of suitable formulations of pharmaceutical compositions available, as described below (See, e.g., Remington's Pharmaceutical Sciences, 17th ed., 1989).

[0175] In accordance with some embodiments, there is provided an RNA molecule which binds to/associates with and/or directs the RNA guided DNA nuclease to a sequence comprising at least one nucleotide which differs between alleles (e.g., SNP) of a gene of interest (i.e., a sequence of one C3 allele which is not present in the other C3 allele). Any sequence difference between C3 alleles may be targeted by an RNA molecule of the present invention to modify or edit a single C3 allele.

[0176] The disclosed compositions and methods may also be used in the manufacture of a medicament for treating dominant genetic disorders in a patient.

### Mechanisms of Action for C3 Safe Harbor Knock-In Methods

[0177] Without being bound by any theory or mechanism, the instant invention may be utilized to apply a CRISPR nuclease to process a C3 allele in order to introduce a sequence to a safe harbor site within the C3 allele and thereby control expression of the introduced sequence by the promoter of the C3 allele. Expression of the introduced sequence thereby prevents or treats a liver-related disorder. A specific guide sequence may be selected from Table 1 based on the targeted position and the type of CRISPR nuclease used (e.g. according to a required PAM sequence).

[0178] The C3 gene is located on chromosome 19 and encodes the Complement component 3 protein. A donor molecule may be used to introduce a desired sequence of nucleotides into a C3 safe harbor site via knock-in. Accordingly, any sequence encoding an expression product that prevents or treats a liver-related disease may be introduced at a C3 safe harbor site. Accordingly, non-limiting examples of sequences encoded by a donor molecule include, ATP7B, A1AT, G6PC, SERPINA, LDLR, TTR, OTC—omithine transcarbamylase, ASD—argininosuccinic acid synthetase, arginase, argininosuccinase, carbamoyl phosphate synthetase, and N-acetylglutamate synthetase, or portions thereof.

[0179] One strategy is to knock-in a sequence of nucleotides in the first intron or the first intron that follows the first coding exon of the C3 gene. This strategy utilizes an RNA molecule to target a CRISPR nuclease to Intron 1 of the C3 gene and thereby mediate a double-stranded break. Since the break is mediated in a nonregulatory region, it is not expected to affect the expression of the gene. For knock-in of a sequence without a knockout of C3, the sequence is inserted as a new exon (namely, Exon 2), by adding splicing acceptor (SA) and splicing donor (SD) elements to the knock-in donor cassette. In addition, to prevent the interruption of the expression of the C3 gene, the donor cassette includes at least one 2A self-cleaving peptide and/or the signal peptide of C3 at the C-terminus of the inserted gene, which is cleaved in the endoplasmic reticulum and enables the separation of the inserted sequence protein expression product from C3 protein.

[0180] Another strategy is to knock-in a sequence of nucleotides in the first intron of a specific C3 allele. According to the gnomAD, there are healthy individuals with C3 frameshift mutations, which suggests that haploinsufficiency is not a concern. Therefore, the knocked-in sequence of nucleotides can be inserted into a single C3 allele as a new exon with a translation termination signal, thereby knocking-out the expression of only one C3 allele while the other C3 allele remains unaffected. A C3 allele-specific editing event can be achieved, for example, by targeting a highly frequent SNP such as rs199713383 located in Intron 1.

[0181] Another strategy is to knock-in a sequence of nucleotides in the C3 gene by replacing the stop codon. In this case a biallelic break will be mediated in a 3′UTR region either up to 150 nucleotides downstream of the stop codon or upstream to the stop codon but in an intron region. The location of the break in these regions does not affect the expression of C3. The knocked-in sequence of nucleotides is inserted in place of the stop codon and the knock-in donor cassette contains at least one 2A self-cleaving peptide at the N-terminus of the inserted sequence of nucleotides enabling the separation of the inserted sequence protein expression product from C3 protein.

[0182] Another strategy is to knock-in a sequence of nucleotides in a specific C3 allele by replacing the stop codon. This can be achieved by utilizing an RNA molecule to target a CRISPR nuclease to a SNP position located within 150 nucleotides upstream to the stop codon, such as rs17030 located in Exon 41 of a C3 allele.

Examples of RNA Guide Sequences which Specifically Target Alleles of the C3 Gene

[0183] Although a large number of guide sequences can be designed to target a C3 allele, the nucleotide sequences described in Table 1 identified by SEQ ID NOs: 1-7,046 below were specifically selected to effectively implement the methods set forth herein and to effectively discriminate between alleles.

[0184] Table 1 shows guide sequences designed for use as described in the embodiments above to associate with C3 alleles. Each engineered guide molecule is further designed such as to associate with a target genomic DNA sequence of interest that lies next to a protospacer adjacent motif (PAM), e.g., a PAM matching the sequence NGG or NAG, where “N” is any nucleobase. The guide sequences were designed to work in conjunction with one or more different CRISPR nucleases, including, but not limited to, e.g. SpCas9WT (PAM SEQ: NGG), SpCas9.VQR.1 (PAM SEQ: NGAN), SpCas9.VQR.2 (PAM SEQ: NGNG), SpCas9.EQR (PAM SEQ: NGAG), SpCas9.VRER (PAM SEQ: NGCG), SaCas9WT (PAM SEQ: NNGRRT), SpRY (PAM SEQ: NRN or NYN), NmCas9WT (PAM SEQ: NNNNGATT), Cpf1 (PAM SEQ: TTTV), or JeCas9WT (PAM SEQ: NNNVRYM). RNA molecules of the present invention are each designed to form complexes in conjunction with one or more different CRISPR nucleases and designed to target polynucleotide sequences of interest utilizing one or more different PAM sequences respective to the CRISPR nuclease utilized.

TABLE 1
Guide sequence portions designed to associate with specific C3 gene targets

| | SEQ ID NOs: of | SEQ ID NOs: of | SEQ ID NOs: of |
|---|---|---|---|
| | 20-nucleotide guide | 21-nucleotide guide | 22-nucleotide guide |
| Target | sequence portions | sequence portions | sequence portions |
| 19:6677978_G_A | 1-49 | 50-101 | 102-155 |
| rs17030_REF | | | |
| 19:6677978_G_A | 1, 3, 5, 8, 16, 20, 23, | 50-51, 55, 58, 66, 70, | 102-103, 107, 118, |
| rs17030_SNP | 28, 35, 41, 47, 156- | 73, 78, 85, 91-92, 99, | 121, 123, 126-127, |
| | 192 | 193-232 | 132, 145-146, 153, |
| | | | 233-274 |
| 19:6720063_A_AT | 275-324 | 325-376 | 377-430 |
| rs199713383_REF | | | |
| 19:6720063_A_AT | 280, 282, 285, 287- | 327, 330, 332, 335, | 379, 382, 384, 387, |
| rs199713383_SNP | 288, 290, 306, 312, | 338, 340, 356, 364, | 390, 409, 413, 416- |
| | 314, 317, 323, 431-468 | 366, 374-375, 469-508 | 417, 419, 428, 509-550 |
| 19:6720065_AC_A | 275-276, 278-279, | 325-326, 328-361, | 377-407, 409-414, |
| rs35473940_REF | 281-310, 312-320, | 364-372, 374-376, | 417-426, 428-430, |
| | 322-324, 551-554 | 555-558 | 559-562 |
| 19:6720065_AC_A | 276, 279, 281, 288, | 326, 329, 331, 337, | 378, 381, 383, 389, |
| rs35473940_SNP | 292, 296, 312, 315, | 342, 346, 360, 364, | 392, 394, 413, 426, |
| | 322, 553-554, 563-592 | 374, 557-558, 593-624 | 428, 561-562, 625-658 |
| 19:6677732-6677881 | 659-908 | 909-1156 | 1157-1402 |
| 3′UTR | | | |
| 19:6719404-6720515 | 275-324, 551-554, | 325-376, 555-558, | 377-430, 559-562, |
| Intron 1 | 583, 1403-3289 | 611, 3290-5153 | 656, 5154-7046 |

The indicated locations listed in column 1 of the Table 1 are based on gnomAD v3 database and UCSC Genome Browser assembly ID: hg38, Sequencing/Assembly provider ID: Genome Reference Consortium Human GRCh38.p12 (GCA_000001405.27). Assembly date: December 2013 initial release; Dececember 2017 patch release 12.
The SNP details are indicated by the listed SNP ID Nos. (“rs numbers”), which are based on the NCBI 2018 database of Single Nucleotide Polymorphisms (dbSNP)). The indicated DNA mutations are associated with Transcript Consequence NM_001256054 as obtained from NCBI RefSeq genes.

[0185] Examples are provided below to facilitate a more complete understanding of the invention. The following examples illustrate the exemplary modes of making and practicing the invention. However, the scope of the invention is not limited to specific embodiments disclosed in these Examples, which are for purposes of illustration only.

### EXPERIMENTAL DETAILS

### Example 1: C3 On-Target Activity Analysis

[0186] Guide sequences comprising 17-50 contiguous nucleotides containing nucleotides in the sequence set forth in any one of SEQ ID NOs: 1-7,046 are screened for high on target activity using SpCas9 in HeLa cells. On target activity is determined by DNA capillary electrophoresis analysis.

### Example 2: Activity of C3-Targeting RNA Guide Molecules

[0187] The C3 gene was selected as a genomic safe harbor site to target in liver cells due to its abundant expression in the target tissue and its ability to accommodate the integration of new sequences in a manner that ensures secretion and preserves C3 expression. The insertion site was engineered into the first intron of C3, in close proximity to a secretory peptide encoded at the first exon and ultimately cleaved from the final protein product. A guide screen using OMNI-50 and OMNI-79 CRISPR nucleases was performed in HeLa cells. Briefly, an OMNI-50 or OMNI-79 nuclease encoding plasmid (6 4ng) was co-transfected with each of the guide-encoding DNA plasmids (2 0ng) in a 96 well plate format using jetOPTIMUS reagent (Polyplus). Cells were harvested 72 hours post-DNA transfection, genomic DNA was extracted, and then used for next-generation sequencing (NGS) analyses. The graph in FIG. 1 represents the average of % editing ±standard deviation (STDV) of three (3) independent experiments. NGS analyses shows a range of 8% to 86% editing for both nucleases. Notably, OMNI-50 RNP compositions generally exhibit increased activity compared to DNA-based compositions, therefore DNA screening in HeLa cells has lower cut-off for proof of concept.

[0188] The CRISPR nuclease and the HDR template can be delivered to the target cells by adeno-associated virus (AAV). Due to its small size, OMNI-79 nuclease can be packed in AAV together with a guide molecule. Guides “g6” and “g11” were cloned into a AAV vector with OMNI-79 V5570 nuclease to test activity in HeLa cells (FIG. 2). Briefly, AAV plasmid (15 0ng) was transfected in a 96 well plate format using jetOPTIMUS reagent (Polyplus). Genomic DNA was extracted 72 hours post-transfection and analyzed by NGS. The graph in FIG. 2 represents the average of % editing ±STDV of three (3) independent experiments.

[0189] Activity of OMNI-50 guides “g6” and “g11” was evaluated in HepG2 cells by RNP electroporation. Briefly, 4×10⁵ HepG2 cells were mixed with preassembled RNPs composed of 105 pmole OMNI-50 protein and 120 pmole sgRNAs, and then mixed with 100 pmole of an electroporation enhancer (IDT-1075916). The mix was then electroporated into the cells using SF Cell 4D-Nucleofector X Kit S (PBC2-00675, Lonza) by applying the DS-123 program. A fraction of the cells were harvested 72 hours post-electroporation and genomic DNA was extracted to measure on-target activity by NGS. According to NGS analysis, both guides demonstrated high indel formation activity (FIG. 2).

[0190] To assess the effect of OMNI-50 guide composition editing on C3 expression, total RNA was extracted from HepG2 cells seven (7) days post-electroporation and the mRNA levels of C3 was measured by qRT-PCR. The results demonstrated preserved expression of C3 since only a minor effect on the level of C3 mRNA was detected (FIG. 3).

[0191] To validate the feasibility of HDR at a C3 locus, three constructs with homology arm lengths of 500 nucleotides (SEQ ID NO: 7054), 800 nucleotides (SEQ ID NO: 7053), and 927 nucleotides (SEQ ID NO: 7052) were cloned. Homology arms were positioned at the cut site of a “g11” guide molecule. A sequence encoding GFP with a poly-A tail was used as a reporter gene in the HDR template. Splice acceptor sites 32 nucleotides in length were added upstream of the GFP sequence (FIG. 4). In this case, the splice site sequences was taken from a pmaxGFP vector (Lonza), although other splice sequences could be used. This specific HDR template insertion was used as a proof of concept and interferes with C3 endogenous protein expression. Other donor templates could be designed with a P2A peptide sequences in order to avoid the use of a “STOP” codon and allow C3 protein expression.

[0192] OMNI-79 V5570 nuclease and C3-targeting “g11 ” guide molecule, or a GFP HDR template, were packed in AAV DJ viral particles. HepG2 cells were infected with each of the indicated AAV particles at a multiplicity of infection (MOI) of 10⁵. Cells were analyzed by flow cytometry for GFP expression 72 hours and 15 days following treatment (FIG. 5 and FIG. 6). GFP secretion was evaluated by a plate reader (FIG. 7). Editing levels were analyzed after 72 hours by NGS after DNA extraction. Cells infected with the nuclease and guide molecule alone showed editing of 42.24±4.4%. There is a correlation between editing levels and HDR rates indicating that HDR is very efficient.

[0193] GFP fluorescence was also detected in the cell media (FIG. 7), indicating correct integration and splicing of the HDR template.

[0194] Similar HDR levels were also demonstrated by RNP editing with OMNI-50 nuclease and a C3-targeting “g11 ” guide using electroporation and AAV delivery of an HDR template (FIG. 8, FIG. 9). Editing levels were 53.6±1.05% in the RNP only treated cells.

TABLE 2
22-nucletoide guide sequence portions
targeting intron 1 of C3.

| Guide Name | Sequence | PAM |
|---|---|---|
| g2 | GGGUUUAAAGAUUGGCUACUUC | GGG |
| | (SEQ ID NO: 6417) | |
| g3 | UACUUCGGGUUCAUGUAUAGUU | UGG |
| | (SEQ ID NO: 6617) | |
| g4 | ACUUCGGGUUCAUGUAUAGUUG | GGG |
| | (SEQ ID NO: 5403) | |
| g6 | AGGUUUUGGCGUAUGUGGGUUU | GGG |
| | (SEQ ID NO: 5493) | |
| g7 | UUUGGCGUAUGUGGGUUUGGGU | AGG |
| | (SEQ ID NO: 7030) | |
| g8 | UGGGUUUGGGUAGGUAGAGUUG | AGG |
| | (SEQ ID NO: 6873) | |
| g9 | GGGUUUGGGUAGGUAGAGUUGA | GGG |
| | (SEQ ID NO: 6421) | |
| g10 | GGUAGGUAGAGUUGAGGGUGUC | CGG |
| | (SEQ ID NO: 6425) | |
| g11 | GUAGGUAGAGUUGAGGGUGUCC | GGG |
| | (SEQ ID NO: 6473) | |
| g13 | GCCAGGCCCAGCUGGCUGAGAG | UGG |
| | (SEQ ID NO: 6240) | |
| g15 | AGCUGGCUGAGAGUGGGAGUCA | UGG |
| | (SEQ ID NO: 5453) | |
| g23 | GAGGUUUGGACUUUACAAGAUU | UGG |
| | (SEQ ID NO: 6176) | |
| g24 | AGGUUUGGACUUUACAAGAUUU | GGG |
| | (SEQ ID NO: 5492) | |
| g28 | GUAUUUAUUAGGACUGGGGUGU | UGG |
| | (SEQ ID NO: 6481) | |

TABLE 3
OMNI CRISPR nuclease sequences, PAM
requirements, and sgRNA scaffold
sequences

| OMNI CRISPR | | |
|---|---|---|
| Nuclease and | PAM | sgRNA Scaffold |
| gRNA | Sequence | Sequence |
| OMNI-79 | NGR | GUUGCCGCUGGAGAAAUC |
| (SEQ ID | | CAGUUGUUAACAAGCAGC |
| NO: 7055) | | UUGACUGCACCAAAUAAG |
| | | GCGGGGGCUGCGGCCCUC |
| | | GCUUUUUU |
| | | (SEQ ID NO: 7058) |
| OMNI-79 V5570 | NGR | GUUGCCGCUGGAGAAAUC |
| (SEQ ID | | CAGUUGUUAACAAGCAGC |
| NO: 7056) | | UUGACUGCACCAAAUAAG |
| | | GCGGGGGCUGCGGCCCUC |
| | | GCUUUUUU |
| | | (SEQ ID NO: 7058) |
| OMNI-50 | NGG | GUUUGAGAGUUAUGUAAG |
| (SEQ ID | | AAAUUACAUGACGAGUUC |
| NO: 7057) | | AAAUAAAAAUUUAUUCAA |
| | | ACCGCCUAUUUAUAGGCC |
| | | GCAGAUGUUCUGCAUUAU |
| | | GCUUGCUAUUGCAAGCUU |
| | | UUUU |
| | | (SEQ ID NO: 7059) |

OMNI-79 CRISPR nuclease and OMNI-50 CRISPR nuclease are described in PCT International Application Publication Nos. WO/2021/248016 and WO/2020/223513, respectively, the contents of each of which are hereby incorporated by reference.

### REFERENCES

[0195] 1. Ahmad and Allen (1992) “Antibody-mediated Specific Binging and Cytotoxicity of Lipsome-entrapped Doxorubicin to Lung Cancer Cells in Vitro”, Cancer Research 52:4817-20.
[0196] 2. Anderson (1992) “Human gene therapy”, Science 256:808-13.
[0197] 3. Anzalone et al. (2019) “Search-and-replace genomme editing without double-strand brakes or donor DNA”, Nature 576, 149-157.
[0198] 4. Basha et al. (2011) “Influence of Cationic Lipid Composition on Gene Silencing Properties of Lipid Nanoparticle Formulations of siRNA in Antigen-Presenting Cells”, Mol. Ther. 19(12):2186-200.
[0199] 5. Behr (1994) Gene transfer with synthetic cationic amphiphiles: Prospects for gene therapy”, Bioconjuage Chem 5:382-89.
[0200] 6. Blaese (1995) “Vectors in cancer therapy: how will they deliver”, Cancer Gene Ther. 2:291-97.
[0201] 7. Blaese et al. (1995) “T lymphocyte-directed gene therapy for ADA-SCID: initial trial results after 4 years”, Science 270(5235):475-80.
[0202] 8. Buchschacher and Panganiban (1992) “Human immunodeficiency virus vectors for inducible expression of foreign genes”, J. Virol. 66:2731-39.
[0203] 9. Burstein et al. (2017) “New CRISPR-Cas systems from uncultivated microbes”, Nature 542:237-41.
[0204] 10. Chang and Wilson (1987) “Modification of DNA ends can decrease end-joining relative to homologous recombination in mammalian cells”, Proc. Natl. Acad. Sci. USA 84:4959-4963.
[0205] 11. Chung et al. (2006) “Agrobacterium is not alone: gene transfer to plants by viruses and other bacteria”, Trends Plant Sci. 11(1):1-4.
[0206] 12. Coelho et al. (2013) “Safety and efficacy of RNAi therapy for transthyretin amyloidosis” N. Engl. J. Med. 369, 819-829.
[0207] 13. Collias and Beisel (2021) “CRISPR technologies and the search for the PAM-free nuclease”, Nature Communications 12, 555.
[0208] 14. Crystal (1995) “Transfer of genes to humans: early lessons and obstacles to success”, Science 270(5235):404-10.
[0209] 15. Dillon (1993) “Regulation gene expression in gene therapy” Trends in Biotechnology 11(5):167-173.
[0210] 16. Dranoff et al. (1997) “A phase I study of vaccination with autologous, irradiated melanoma cells engineered to secrete human granulocyte macrophage colony stimulating factor”, Hum. Gene Ther. 8(1):111-23.
[0211] 17. Dunbar et al. (1995) “Retrovirally marked CD34-enriched peripheral blood and bone marrow cells contribute to long-term engraftment after autologous transplantation”, Blood 85:3048-57.
[0212] 18. Ellem et al. (1997) “A case report: immune responses and clinical course of the first human use of granulocyte/macrophage-colony-stimulating-factor-transduced autologous melanoma cells for immunotherapy”, Cancer Immunol Immunother 44:10-20.
[0213] 19. Gao and Huang (1995) “Cationic liposome-mediated gene transfer” Gene Ther. 2(10):710-22.
[0214] 20. Haddada et al. (1995) “Gene Therapy Using Adenovirus Vectors”, in: The Molecular Repertoire of Adenoviruses III: Biology and Pathogenesis, ed. Doerfler and Bohm, pp. 297-306.
[0215] 21. Han et al. (1995) “Ligand-directed retro-viral targeting of human breast cancer cells”, Proc Natl Acad Sci U.S.A. 92(21):9747-51.
[0216] 22. Hu et al. (2018) “Evolved Cas9 variants with broad PAM compatibility and high DNA specificity”, Nature 556(7699):57-63.
[0217] 23. Inaba et al. (1992) “Generation of large numbers of dendritic cells from mouse bone marrow cultures supplemented with granulocyte/macrophage colony-stimulating factor”, J Exp Med. 176(6):1693-702.
[0218] 24. Jinek et al. (2012) “A programmable dual-RNA-guided DNA endonuclease in adaptive bacterial immunity,” Science 337(6096):816-21.
[0219] 25. Johan et al. (1992) “GLVR1, a receptor for gibbon ape leukemia virus, is homologous to a phosphate permease of Neurospora crassa and is expressed at high levels in the brain and thymus”, J Virol 66(3):1635-40.
[0220] 26. Judge et al. (2006) “Design of noninflammatory synthetic siRNA mediating potent gene silencing in vivo”, Mol Ther. 13(3):494-505.
[0221] 27. Kohn et al. (1995) “Engraftment of gene-modified umbilical cord blood cells in neonates with adnosine deaminase deficiency”, Nature Medicine 1:1017-23.
[0222] 28. Kremer and Perricaudet (1995) “Adenovirus and adeno-associated virus mediated gene transfer”, Br. Med. Bull. 51(1):31-44.
[0223] 29. Macdiarmid et al. (2009) “Sequential treatment of drug-resistant tumors with targeted minicells containing siRNA or a cytotoxic drug”, Nat Biotechnol. 27(7):643-51.
[0224] 30. Malech et al. (1997) “Prolonged production of NADPH oxidase-corrected granulocytes after gene therapy of chronic granulomatous disease”, PNAS 94(22):12133-38.
[0225] 31. Miller et al. (1991) “Construction and properties of retrovirus packaging cells based on gibbon ape leukemia virus”, J Virol. 65(5):2220-24.
[0226] 32. Miller (1992) “Human gene therapy comes of age”, Nature 357:455-60.
[0227] 33. Mitani and Caskey (1993) “Delivering therapeutic genes—matching approach and application”, Trends in Biotechnology 11(5):162-66.
[0228] 34. Nabel and Felgner (1993) “Direct gene transfer for immunotherapy and immunization”, Trends in Biotechnology 11(5):211-15.
[0229] 35. Nishimasu et al. (2018) “Engineered CRISPR-Cas9 nuclease with expanded targeting space”, Science 361(6408):1259-1262.
[0230] 36. Remy et al. (1994) “Gene Transfer with a Series of Lipophilic DNA-Binding Molecules”, Bioconjugate Chem. 5(6):647-54.
[0231] 37. Sentmanat et al. (2018) “A Survey of Validation Strategies for CRISPR-Cas9 Editing”, Scientific Reports 8:888, doi:10.1038/s41598-018-19441-8.
[0232] 38. Sommerfelt et al. (1990) “Localization of the receptor gene for type D simian retroviruses on human chromosome 19”, J. Virol. 64(12):6214-20.
[0233] 39. Van Brunt (1988) “Molecular framing: transgenic animals as bioactors” Biotechnology 6:1149-54.
[0234] 40. Vigne et al. (1995) “Third-generation adenovectors for gene therapy”, Restorative Neurology and Neuroscience 8 (1,2): 35-36.
[0235] 41. Walton et al. (2020) “Unconstrained genome targeting with near-PAMless engineered CRISPR-Cas9 variants”, Science 368(6488):290-296.
[0236] 42. Weissman and Kariko (2015) “mRNA: Fulfilling the promise of gene therapy”, Molecular Therapy (9):1416-7.
[0237] 43. Wilson et al. (1989) “Formation of infectious hybrid virion with gibbon ape leukemia virus and human T-cell leukemia virus retroviral envelope glycoproteins and the gag and pol proteins of Moloney murine leukemia virus”, J. Virol. 63:2374-78.
[0238] 44. Yu et al. (1994) “Progress towards gene therapy for HIV infection”, Gene Ther. 1(1):13-26.
[0239] 45. Zetsche et al. (2015) “Cpf1 is a single RNA-guided endonuclease of a class 2 CRIPSR-Cas system” Cell 163(3):759-71.
[0240] 46. Zuris et al. (2015) “Cationic lipid-mediated delivery of proteins enables efficient protein based genome editing in vitro and in vivo” Nat Biotechnol. 33(1):73-80.

The application's sequence listing, which the Patent Office published only in electronic form, follows.

SEQUENCE LISTING (7059 sequences)

SEQ ID NO: 1 - RNA, 20 nt, Artificial Sequence
  C3-targeting RNA guide sequence portion
acacuuggguggagcacugg

SEQ ID NO: 2 - RNA, 20 nt, Artificial Sequence
  C3-targeting RNA guide sequence portion
acuggcccgaggaggacgaa

SEQ ID NO: 3 - RNA, 20 nt, Artificial Sequence
  C3-targeting RNA guide sequence portion
acuuggguggagcacuggcc

SEQ ID NO: 4 - RNA, 20 nt, Artificial Sequence
  C3-targeting RNA guide sequence portion
agcacuggcccgaggaggac

SEQ ID NO: 5 - RNA, 20 nt, Artificial Sequence
  C3-targeting RNA guide sequence portion
aggacacuuggguggagcac

SEQ ID NO: 6 - RNA, 20 nt, Artificial Sequence
  C3-targeting RNA guide sequence portion
auucguccuccucgggccag

SEQ ID NO: 7 - RNA, 20 nt, Artificial Sequence
  C3-targeting RNA guide sequence portion
cacuggcccgaggaggacga

SEQ ID NO: 8 - RNA, 20 nt, Artificial Sequence
  C3-targeting RNA guide sequence portion
cacuuggguggagcacuggc

SEQ ID NO: 9 - RNA, 20 nt, Artificial Sequence
  C3-targeting RNA guide sequence portion
cauucguccuccucgggcca

SEQ ID NO: 10 - RNA, 20 nt, Artificial Sequence
  C3-targeting RNA guide sequence portion
cccgaggaggacgaaugcca

SEQ ID NO: 11 - RNA, 20 nt, Artificial Sequence
  C3-targeting RNA guide sequence portion
ccgaggaggacgaaugccaa

SEQ ID NO: 12 - RNA, 20 nt, Artificial Sequence
  C3-targeting RNA guide sequence portion
ccuccucgggccagugcucc

SEQ ID NO: 13 - RNA, 20 nt, Artificial Sequence
  C3-targeting RNA guide sequence portion
ccucgggccagugcuccacc

SEQ ID NO: 14 - RNA, 20 nt, Artificial Sequence
  C3-targeting RNA guide sequence portion
cgggccagugcuccacccaa

SEQ ID NO: 15 - RNA, 20 nt, Artificial Sequence
  C3-targeting RNA guide sequence portion
cguccuccucgggccagugc

SEQ ID NO: 16 - RNA, 20 nt, Artificial Sequence
  C3-targeting RNA guide sequence portion
cgucuuggcauucguccucc

SEQ ID NO: 17 - RNA, 20 nt, Artificial Sequence
  C3-targeting RNA guide sequence portion
cuccucgggccagugcucca

SEQ ID NO: 18 - RNA, 20 nt, Artificial Sequence
  C3-targeting RNA guide sequence portion
cucgggccagugcuccaccc

SEQ ID NO: 19 - RNA, 20 nt, Artificial Sequence
  C3-targeting RNA guide sequence portion
cuggcccgaggaggacgaau

SEQ ID NO: 20 - RNA, 20 nt, Artificial Sequence
  C3-targeting RNA guide sequence portion
cuucgucuuggcauucgucc

SEQ ID NO: 21 - RNA, 20 nt, Artificial Sequence
  C3-targeting RNA guide sequence portion
cuuggcauucguccuccucg

SEQ ID NO: 22 - RNA, 20 nt, Artificial Sequence
  C3-targeting RNA guide sequence portion
cuuggguggagcacuggccc

SEQ ID NO: 23 - RNA, 20 nt, Artificial Sequence
  C3-targeting RNA guide sequence portion
gacacuuggguggagcacug

SEQ ID NO: 24 - RNA, 20 nt, Artificial Sequence
  C3-targeting RNA guide sequence portion
gagcacuggcccgaggagga

SEQ ID NO: 25 - RNA, 20 nt, Artificial Sequence
  C3-targeting RNA guide sequence portion
gcacuggcccgaggaggacg

SEQ ID NO: 26 - RNA, 20 nt, Artificial Sequence
  C3-targeting RNA guide sequence portion
gcauucguccuccucgggcc

SEQ ID NO: 27 - RNA, 20 nt, Artificial Sequence
  C3-targeting RNA guide sequence portion
gcccgaggaggacgaaugcc

SEQ ID NO: 28 - RNA, 20 nt, Artificial Sequence
  C3-targeting RNA guide sequence portion
ggacacuuggguggagcacu

SEQ ID NO: 29 - RNA, 20 nt, Artificial Sequence
  C3-targeting RNA guide sequence portion
ggagcacuggcccgaggagg

SEQ ID NO: 30 - RNA, 20 nt, Artificial Sequence
  C3-targeting RNA guide sequence portion
ggcauucguccuccucgggc

SEQ ID NO: 31 - RNA, 20 nt, Artificial Sequence
  C3-targeting RNA guide sequence portion
ggcccgaggaggacgaaugc

SEQ ID NO: 32 - RNA, 20 nt, Artificial Sequence
  C3-targeting RNA guide sequence portion
ggguggagcacuggcccgag

SEQ ID NO: 33 - RNA, 20 nt, Artificial Sequence
  C3-targeting RNA guide sequence portion
gguggagcacuggcccgagg

SEQ ID NO: 34 - RNA, 20 nt, Artificial Sequence
  C3-targeting RNA guide sequence portion
guccuccucgggccagugcu

SEQ ID NO: 35 - RNA, 20 nt, Artificial Sequence
  C3-targeting RNA guide sequence portion
gucuuggcauucguccuccu

SEQ ID NO: 36 - RNA, 20 nt, Artificial Sequence
  C3-targeting RNA guide sequence portion
guggagcacuggcccgagga

SEQ ID NO: 37 - RNA, 20 nt, Artificial Sequence
  C3-targeting RNA guide sequence portion
uccuccucgggccagugcuc

SEQ ID NO: 38 - RNA, 20 nt, Artificial Sequence
  C3-targeting RNA guide sequence portion
uccucgggccagugcuccac

SEQ ID NO: 39 - RNA, 20 nt, Artificial Sequence
  C3-targeting RNA guide sequence portion
ucgggccagugcuccaccca

SEQ ID NO: 40 - RNA, 20 nt, Artificial Sequence
  C3-targeting RNA guide sequence portion
ucguccuccucgggccagug

SEQ ID NO: 41 - RNA, 20 nt, Artificial Sequence
  C3-targeting RNA guide sequence portion
ucgucuuggcauucguccuc

SEQ ID NO: 42 - RNA, 20 nt, Artificial Sequence
  C3-targeting RNA guide sequence portion
uggagcacuggcccgaggag

SEQ ID NO: 43 - RNA, 20 nt, Artificial Sequence
  C3-targeting RNA guide sequence portion
uggcauucguccuccucggg

SEQ ID NO: 44 - RNA, 20 nt, Artificial Sequence
  C3-targeting RNA guide sequence portion
uggcccgaggaggacgaaug

SEQ ID NO: 45 - RNA, 20 nt, Artificial Sequence
  C3-targeting RNA guide sequence portion
uggguggagcacuggcccga

SEQ ID NO: 46 - RNA, 20 nt, Artificial Sequence
  C3-targeting RNA guide sequence portion
uucguccuccucgggccagu

SEQ ID NO: 47 - RNA, 20 nt, Artificial Sequence
  C3-targeting RNA guide sequence portion
uucgucuuggcauucguccu

SEQ ID NO: 48 - RNA, 20 nt, Artificial Sequence
  C3-targeting RNA guide sequence portion
uuggcauucguccuccucgg

SEQ ID NO: 49 - RNA, 20 nt, Artificial Sequence
  C3-targeting RNA guide sequence portion
uuggguggagcacuggcccg

SEQ ID NO: 50 - RNA, 21 nt, Artificial Sequence
  C3-targeting RNA guide sequence portion
aaggacacuuggguggagcac

SEQ ID NO: 51 - RNA, 21 nt, Artificial Sequence
  C3-targeting RNA guide sequence portion
acacuuggguggagcacuggc

SEQ ID NO: 52 - RNA, 21 nt, Artificial Sequence
  C3-targeting RNA guide sequence portion
acuggcccgaggaggacgaau

SEQ ID NO: 53 - RNA, 21 nt, Artificial Sequence
  C3-targeting RNA guide sequence portion
acuuggguggagcacuggccc

SEQ ID NO: 54 - RNA, 21 nt, Artificial Sequence
  C3-targeting RNA guide sequence portion
agcacuggcccgaggaggacg

SEQ ID NO: 55 - RNA, 21 nt, Artificial Sequence
  C3-targeting RNA guide sequence portion
aggacacuuggguggagcacu

SEQ ID NO: 56 - RNA, 21 nt, Artificial Sequence
  C3-targeting RNA guide sequence portion
auucguccuccucgggccagu

SEQ ID NO: 57 - RNA, 21 nt, Artificial Sequence
  C3-targeting RNA guide sequence portion
cacuggcccgaggaggacgaa

SEQ ID NO: 58 - RNA, 21 nt, Artificial Sequence
  C3-targeting RNA guide sequence portion
cacuuggguggagcacuggcc

SEQ ID NO: 59 - RNA, 21 nt, Artificial Sequence
  C3-targeting RNA guide sequence portion
cauucguccuccucgggccag

SEQ ID NO: 60 - RNA, 21 nt, Artificial Sequence
  C3-targeting RNA guide sequence portion
cccgaggaggacgaaugccaa

SEQ ID NO: 61 - RNA, 21 nt, Artificial Sequence
  C3-targeting RNA guide sequence portion
ccgaggaggacgaaugccaag

SEQ ID NO: 62 - RNA, 21 nt, Artificial Sequence
  C3-targeting RNA guide sequence portion
ccuccucgggccagugcucca

SEQ ID NO: 63 - RNA, 21 nt, Artificial Sequence
  C3-targeting RNA guide sequence portion
ccucgggccagugcuccaccc

SEQ ID NO: 64 - RNA, 21 nt, Artificial Sequence
  C3-targeting RNA guide sequence portion
cgggccagugcuccacccaag

SEQ ID NO: 65 - RNA, 21 nt, Artificial Sequence
  C3-targeting RNA guide sequence portion
cguccuccucgggccagugcu

SEQ ID NO: 66 - RNA, 21 nt, Artificial Sequence
  C3-targeting RNA guide sequence portion
cgucuuggcauucguccuccu

SEQ ID NO: 67 - RNA, 21 nt, Artificial Sequence
  C3-targeting RNA guide sequence portion
cuccucgggccagugcuccac

SEQ ID NO: 68 - RNA, 21 nt, Artificial Sequence
  C3-targeting RNA guide sequence portion
cucgggccagugcuccaccca

SEQ ID NO: 69 - RNA, 21 nt, Artificial Sequence
  C3-targeting RNA guide sequence portion
cuggcccgaggaggacgaaug

SEQ ID NO: 70 - RNA, 21 nt, Artificial Sequence
  C3-targeting RNA guide sequence portion
cuucgucuuggcauucguccu

SEQ ID NO: 71 - RNA, 21 nt, Artificial Sequence
  C3-targeting RNA guide sequence portion
cuuggcauucguccuccucgg

SEQ ID NO: 72 - RNA, 21 nt, Artificial Sequence
  C3-targeting RNA guide sequence portion
cuuggguggagcacuggcccg

SEQ ID NO: 73 - RNA, 21 nt, Artificial Sequence
  C3-targeting RNA guide sequence portion
gacacuuggguggagcacugg

SEQ ID NO: 74 - RNA, 21 nt, Artificial Sequence
  C3-targeting RNA guide sequence portion
gagcacuggcccgaggaggac

SEQ ID NO: 75 - RNA, 21 nt, Artificial Sequence
  C3-targeting RNA guide sequence portion
gcacuggcccgaggaggacga

SEQ ID NO: 76 - RNA, 21 nt, Artificial Sequence
  C3-targeting RNA guide sequence portion
gcauucguccuccucgggcca

SEQ ID NO: 77 - RNA, 21 nt, Artificial Sequence
  C3-targeting RNA guide sequence portion
gcccgaggaggacgaaugcca

SEQ ID NO: 78 - RNA, 21 nt, Artificial Sequence
  C3-targeting RNA guide sequence portion
ggacacuuggguggagcacug

SEQ ID NO: 79 - RNA, 21 nt, Artificial Sequence
  C3-targeting RNA guide sequence portion
ggagcacuggcccgaggagga

SEQ ID NO: 80 - RNA, 21 nt, Artificial Sequence
  C3-targeting RNA guide sequence portion
ggcauucguccuccucgggcc

SEQ ID NO: 81 - RNA, 21 nt, Artificial Sequence
  C3-targeting RNA guide sequence portion
ggcccgaggaggacgaaugcc

SEQ ID NO: 82 - RNA, 21 nt, Artificial Sequence
  C3-targeting RNA guide sequence portion
ggguggagcacuggcccgagg

SEQ ID NO: 83 - RNA, 21 nt, Artificial Sequence
  C3-targeting RNA guide sequence portion
gguggagcacuggcccgagga

SEQ ID NO: 84 - RNA, 21 nt, Artificial Sequence
  C3-targeting RNA guide sequence portion
guccuccucgggccagugcuc

SEQ ID NO: 85 - RNA, 21 nt, Artificial Sequence
  C3-targeting RNA guide sequence portion
gucuuggcauucguccuccuc

SEQ ID NO: 86 - RNA, 21 nt, Artificial Sequence
  C3-targeting RNA guide sequence portion
guggagcacuggcccgaggag

SEQ ID NO: 87 - RNA, 21 nt, Artificial Sequence
  C3-targeting RNA guide sequence portion
uccuccucgggccagugcucc

SEQ ID NO: 88 - RNA, 21 nt, Artificial Sequence
  C3-targeting RNA guide sequence portion
uccucgggccagugcuccacc

SEQ ID NO: 89 - RNA, 21 nt, Artificial Sequence
  C3-targeting RNA guide sequence portion
ucgggccagugcuccacccaa

SEQ ID NO: 90 - RNA, 21 nt, Artificial Sequence
  C3-targeting RNA guide sequence portion
ucguccuccucgggccagugc

SEQ ID NO: 91 - RNA, 21 nt, Artificial Sequence
  C3-targeting RNA guide sequence portion
ucgucuuggcauucguccucc

SEQ ID NO: 92 - RNA, 21 nt, Artificial Sequence
  C3-targeting RNA guide sequence portion
ucuucgucuuggcauucgucc

SEQ ID NO: 93 - RNA, 21 nt, Artificial Sequence
  C3-targeting RNA guide sequence portion
ucuuggcauucguccuccucg

SEQ ID NO: 94 - RNA, 21 nt, Artificial Sequence
  C3-targeting RNA guide sequence portion
uggagcacuggcccgaggagg

SEQ ID NO: 95 - RNA, 21 nt, Artificial Sequence
  C3-targeting RNA guide sequence portion
uggcauucguccuccucgggc

SEQ ID NO: 96 - RNA, 21 nt, Artificial Sequence
  C3-targeting RNA guide sequence portion
uggcccgaggaggacgaaugc

SEQ ID NO: 97 - RNA, 21 nt, Artificial Sequence
  C3-targeting RNA guide sequence portion
uggguggagcacuggcccgag

SEQ ID NO: 98 - RNA, 21 nt, Artificial Sequence
  C3-targeting RNA guide sequence portion
uucguccuccucgggccagug

SEQ ID NO: 99 - RNA, 21 nt, Artificial Sequence
  C3-targeting RNA guide sequence portion
uucgucuuggcauucguccuc

SEQ ID NO: 100 - RNA, 21 nt, Artificial Sequence
  C3-targeting RNA guide sequence portion
uuggcauucguccuccucggg

SEQ ID NO: 101 - RNA, 21 nt, Artificial Sequence
  C3-targeting RNA guide sequence portion
uuggguggagcacuggcccga

SEQ ID NO: 102 - RNA, 22 nt, Artificial Sequence
  C3-targeting RNA guide sequence portion
aaggacacuuggguggagcacu

SEQ ID NO: 103 - RNA, 22 nt, Artificial Sequence
  C3-targeting RNA guide sequence portion
acacuuggguggagcacuggcc

SEQ ID NO: 104 - RNA, 22 nt, Artificial Sequence
  C3-targeting RNA guide sequence portion
acuggcccgaggaggacgaaug

SEQ ID NO: 105 - RNA, 22 nt, Artificial Sequence
  C3-targeting RNA guide sequence portion
acuuggguggagcacuggcccg

SEQ ID NO: 106 - RNA, 22 nt, Artificial Sequence
  C3-targeting RNA guide sequence portion
agcacuggcccgaggaggacga

SEQ ID NO: 107 - RNA, 22 nt, Artificial Sequence
  C3-targeting RNA guide sequence portion
aggacacuuggguggagcacug

SEQ ID NO: 108 - RNA, 22 nt, Artificial Sequence
  C3-targeting RNA guide sequence portion
auucguccuccucgggccagug

SEQ ID NO: 109 - RNA, 22 nt, Artificial Sequence
  C3-targeting RNA guide sequence portion
cacuggcccgaggaggacgaau

SEQ ID NO: 110 - RNA, 22 nt, Artificial Sequence
  C3-targeting RNA guide sequence portion
cacuuggguggagcacuggccc

SEQ ID NO: 111 - RNA, 22 nt, Artificial Sequence
  C3-targeting RNA guide sequence portion
cauucguccuccucgggccagu

SEQ ID NO: 112 - RNA, 22 nt, Artificial Sequence
  C3-targeting RNA guide sequence portion
cccgaggaggacgaaugccaag

SEQ ID NO: 113 - RNA, 22 nt, Artificial Sequence
  C3-targeting RNA guide sequence portion
ccgaggaggacgaaugccaaga

SEQ ID NO: 114 - RNA, 22 nt, Artificial Sequence
  C3-targeting RNA guide sequence portion
ccuccucgggccagugcuccac

SEQ ID NO: 115 - RNA, 22 nt, Artificial Sequence
  C3-targeting RNA guide sequence portion
ccucgggccagugcuccaccca

SEQ ID NO: 116 - RNA, 22 nt, Artificial Sequence
  C3-targeting RNA guide sequence portion
cgggccagugcuccacccaagu

SEQ ID NO: 117 - RNA, 22 nt, Artificial Sequence
  C3-targeting RNA guide sequence portion
cguccuccucgggccagugcuc

SEQ ID NO: 118 - RNA, 22 nt, Artificial Sequence
  C3-targeting RNA guide sequence portion
cgucuuggcauucguccuccuc

SEQ ID NO: 119 - RNA, 22 nt, Artificial Sequence
  C3-targeting RNA guide sequence portion
cuccucgggccagugcuccacc

SEQ ID NO: 120 - RNA, 22 nt, Artificial Sequence
  C3-targeting RNA guide sequence portion
cucgggccagugcuccacccaa

SEQ ID NO: 121 - RNA, 22 nt, Artificial Sequence
  C3-targeting RNA guide sequence portion
cucuucgucuuggcauucgucc

SEQ ID NO: 122 - RNA, 22 nt, Artificial Sequence
  C3-targeting RNA guide sequence portion
cuggcccgaggaggacgaaugc

SEQ ID NO: 123 - RNA, 22 nt, Artificial Sequence
  C3-targeting RNA guide sequence portion
cuucgucuuggcauucguccuc

SEQ ID NO: 124 - RNA, 22 nt, Artificial Sequence
  C3-targeting RNA guide sequence portion
cuuggcauucguccuccucggg

SEQ ID NO: 125 - RNA, 22 nt, Artificial Sequence
  C3-targeting RNA guide sequence portion
cuuggguggagcacuggcccga

SEQ ID NO: 126 - RNA, 22 nt, Artificial Sequence
  C3-targeting RNA guide sequence portion
gaaggacacuuggguggagcac

SEQ ID NO: 127 - RNA, 22 nt, Artificial Sequence
  C3-targeting RNA guide sequence portion
gacacuuggguggagcacuggc

SEQ ID NO: 128 - RNA, 22 nt, Artificial Sequence
  C3-targeting RNA guide sequence portion
gagcacuggcccgaggaggacg

SEQ ID NO: 129 - RNA, 22 nt, Artificial Sequence
  C3-targeting RNA guide sequence portion
gcacuggcccgaggaggacgaa

SEQ ID NO: 130 - RNA, 22 nt, Artificial Sequence
  C3-targeting RNA guide sequence portion
gcauucguccuccucgggccag

SEQ ID NO: 131 - RNA, 22 nt, Artificial Sequence
  C3-targeting RNA guide sequence portion
gcccgaggaggacgaaugccaa

SEQ ID NO: 132 - RNA, 22 nt, Artificial Sequence
  C3-targeting RNA guide sequence portion
ggacacuuggguggagcacugg

SEQ ID NO: 133 - RNA, 22 nt, Artificial Sequence
  C3-targeting RNA guide sequence portion
ggagcacuggcccgaggaggac

SEQ ID NO: 134 - RNA, 22 nt, Artificial Sequence
  C3-targeting RNA guide sequence portion
ggcauucguccuccucgggcca

SEQ ID NO: 135 - RNA, 22 nt, Artificial Sequence
  C3-targeting RNA guide sequence portion
ggcccgaggaggacgaaugcca

SEQ ID NO: 136 - RNA, 22 nt, Artificial Sequence
  C3-targeting RNA guide sequence portion
ggguggagcacuggcccgagga

SEQ ID NO: 137 - RNA, 22 nt, Artificial Sequence
  C3-targeting RNA guide sequence portion
gguggagcacuggcccgaggag

SEQ ID NO: 138 - RNA, 22 nt, Artificial Sequence
  C3-targeting RNA guide sequence portion
guccuccucgggccagugcucc

SEQ ID NO: 139 - RNA, 22 nt, Artificial Sequence
  C3-targeting RNA guide sequence portion
gucuuggcauucguccuccucg

SEQ ID NO: 140 - RNA, 22 nt, Artificial Sequence
  C3-targeting RNA guide sequence portion
guggagcacuggcccgaggagg

SEQ ID NO: 141 - RNA, 22 nt, Artificial Sequence
  C3-targeting RNA guide sequence portion
uccuccucgggccagugcucca

SEQ ID NO: 142 - RNA, 22 nt, Artificial Sequence
  C3-targeting RNA guide sequence portion
uccucgggccagugcuccaccc

SEQ ID NO: 143 - RNA, 22 nt, Artificial Sequence
  C3-targeting RNA guide sequence portion
ucgggccagugcuccacccaag

SEQ ID NO: 144 - RNA, 22 nt, Artificial Sequence
  C3-targeting RNA guide sequence portion
ucguccuccucgggccagugcu

SEQ ID NO: 145 - RNA, 22 nt, Artificial Sequence
  C3-targeting RNA guide sequence portion
ucgucuuggcauucguccuccu

SEQ ID NO: 146 - RNA, 22 nt, Artificial Sequence
  C3-targeting RNA guide sequence portion
ucuucgucuuggcauucguccu

SEQ ID NO: 147 - RNA, 22 nt, Artificial Sequence
  C3-targeting RNA guide sequence portion
ucuuggcauucguccuccucgg

SEQ ID NO: 148 - RNA, 22 nt, Artificial Sequence
  C3-targeting RNA guide sequence portion
uggagcacuggcccgaggagga

SEQ ID NO: 149 - RNA, 22 nt, Artificial Sequence
  C3-targeting RNA guide sequence portion
uggcauucguccuccucgggcc

SEQ ID NO: 150 - RNA, 22 nt, Artificial Sequence
  C3-targeting RNA guide sequence portion
uggcccgaggaggacgaaugcc

SEQ ID NO: 151 - RNA, 22 nt, Artificial Sequence
  C3-targeting RNA guide sequence portion
uggguggagcacuggcccgagg

SEQ ID NO: 152 - RNA, 22 nt, Artificial Sequence
  C3-targeting RNA guide sequence portion
uucguccuccucgggccagugc

SEQ ID NO: 153 - RNA, 22 nt, Artificial Sequence
  C3-targeting RNA guide sequence portion
uucgucuuggcauucguccucc

SEQ ID NO: 154 - RNA, 22 nt, Artificial Sequence
  C3-targeting RNA guide sequence portion
uuggcauucguccuccucgggc

SEQ ID NO: 155 - RNA, 22 nt, Artificial Sequence
  C3-targeting RNA guide sequence portion
uuggguggagcacuggcccgag

SEQ ID NO: 156 - RNA, 20 nt, Artificial Sequence
  C3-targeting RNA guide sequence portion
acuggccugaggaggacgaa

SEQ ID NO: 157 - RNA, 20 nt, Artificial Sequence
  C3-targeting RNA guide sequence portion
agcacuggccugaggaggac

SEQ ID NO: 158 - RNA, 20 nt, Artificial Sequence
  C3-targeting RNA guide sequence portion
auucguccuccucaggccag

SEQ ID NO: 159 - RNA, 20 nt, Artificial Sequence
  C3-targeting RNA guide sequence portion
cacuggccugaggaggacga

SEQ ID NO: 160 - RNA, 20 nt, Artificial Sequence
  C3-targeting RNA guide sequence portion
caggccagugcuccacccaa

SEQ ID NO: 161 - RNA, 20 nt, Artificial Sequence
  C3-targeting RNA guide sequence portion
cauucguccuccucaggcca

SEQ ID NO: 162 - RNA, 20 nt, Artificial Sequence
  C3-targeting RNA guide sequence portion
ccucaggccagugcuccacc

SEQ ID NO: 163 - RNA, 20 nt, Artificial Sequence
  C3-targeting RNA guide sequence portion
ccuccucaggccagugcucc

SEQ ID NO: 164 - RNA, 20 nt, Artificial Sequence
  C3-targeting RNA guide sequence portion
ccugaggaggacgaaugcca

SEQ ID NO: 165 - RNA, 20 nt, Artificial Sequence
  C3-targeting RNA guide sequence portion
cguccuccucaggccagugc

SEQ ID NO: 166 - RNA, 20 nt, Artificial Sequence
  C3-targeting RNA guide sequence portion
cucaggccagugcuccaccc

SEQ ID NO: 167 - RNA, 20 nt, Artificial Sequence
  C3-targeting RNA guide sequence portion
cuccucaggccagugcucca

SEQ ID NO: 168 - RNA, 20 nt, Artificial Sequence
  C3-targeting RNA guide sequence portion
cugaggaggacgaaugccaa

SEQ ID NO: 169 - RNA, 20 nt, Artificial Sequence
  C3-targeting RNA guide sequence portion
cuggccugaggaggacgaau

SEQ ID NO: 170 - RNA, 20 nt, Artificial Sequence
  C3-targeting RNA guide sequence portion
cuuggcauucguccuccuca

SEQ ID NO: 171 - RNA, 20 nt, Artificial Sequence
  C3-targeting RNA guide sequence portion
cuuggguggagcacuggccu

SEQ ID NO: 172 - RNA, 20 nt, Artificial Sequence
  C3-targeting RNA guide sequence portion
gagcacuggccugaggagga

SEQ ID NO: 173 - RNA, 20 nt, Artificial Sequence
  C3-targeting RNA guide sequence portion
gcacuggccugaggaggacg

SEQ ID NO: 174 - RNA, 20 nt, Artificial Sequence
  C3-targeting RNA guide sequence portion
gcauucguccuccucaggcc

SEQ ID NO: 175 - RNA, 20 nt, Artificial Sequence
  C3-targeting RNA guide sequence portion
gccugaggaggacgaaugcc

SEQ ID NO: 176 - RNA, 20 nt, Artificial Sequence
  C3-targeting RNA guide sequence portion
ggagcacuggccugaggagg

SEQ ID NO: 177 - RNA, 20 nt, Artificial Sequence
  C3-targeting RNA guide sequence portion
ggcauucguccuccucaggc

SEQ ID NO: 178 - RNA, 20 nt, Artificial Sequence
  C3-targeting RNA guide sequence portion
ggccugaggaggacgaaugc

SEQ ID NO: 179 - RNA, 20 nt, Artificial Sequence
  C3-targeting RNA guide sequence portion
ggguggagcacuggccugag

SEQ ID NO: 180 - RNA, 20 nt, Artificial Sequence
  C3-targeting RNA guide sequence portion
gguggagcacuggccugagg

SEQ ID NO: 181 - RNA, 20 nt, Artificial Sequence
  C3-targeting RNA guide sequence portion
guccuccucaggccagugcu

SEQ ID NO: 182 - RNA, 20 nt, Artificial Sequence
  C3-targeting RNA guide sequence portion
guggagcacuggccugagga

SEQ ID NO: 183 - RNA, 20 nt, Artificial Sequence
  C3-targeting RNA guide sequence portion
uccucaggccagugcuccac

SEQ ID NO: 184 - RNA, 20 nt, Artificial Sequence
  C3-targeting RNA guide sequence portion
uccuccucaggccagugcuc

SEQ ID NO: 185 - RNA, 20 nt, Artificial Sequence
  C3-targeting RNA guide sequence portion
ucguccuccucaggccagug

SEQ ID NO: 186 - RNA, 20 nt, Artificial Sequence
  C3-targeting RNA guide sequence portion
uggagcacuggccugaggag

SEQ ID NO: 187 - RNA, 20 nt, Artificial Sequence
  C3-targeting RNA guide sequence portion
uggcauucguccuccucagg

SEQ ID NO: 188 - RNA, 20 nt, Artificial Sequence
  C3-targeting RNA guide sequence portion
uggccugaggaggacgaaug

SEQ ID NO: 189 - RNA, 20 nt, Artificial Sequence
  C3-targeting RNA guide sequence portion
uggguggagcacuggccuga

SEQ ID NO: 190 - RNA, 20 nt, Artificial Sequence
  C3-targeting RNA guide sequence portion
uucguccuccucaggccagu

SEQ ID NO: 191 - RNA, 20 nt, Artificial Sequence
  C3-targeting RNA guide sequence portion
uuggcauucguccuccucag

SEQ ID NO: 192 - RNA, 20 nt, Artificial Sequence
  C3-targeting RNA guide sequence portion
uuggguggagcacuggccug

SEQ ID NO: 193 - RNA, 21 nt, Artificial Sequence
  C3-targeting RNA guide sequence portion
acuggccugaggaggacgaau

SEQ ID NO: 194 - RNA, 21 nt, Artificial Sequence
  C3-targeting RNA guide sequence portion
acuuggguggagcacuggccu

SEQ ID NO: 195 - RNA, 21 nt, Artificial Sequence
  C3-targeting RNA guide sequence portion
agcacuggccugaggaggacg

SEQ ID NO: 196 - RNA, 21 nt, Artificial Sequence
  C3-targeting RNA guide sequence portion
auucguccuccucaggccagu

SEQ ID NO: 197 - RNA, 21 nt, Artificial Sequence
  C3-targeting RNA guide sequence portion
cacuggccugaggaggacgaa

SEQ ID NO: 198 - RNA, 21 nt, Artificial Sequence
  C3-targeting RNA guide sequence portion
caggccagugcuccacccaag

SEQ ID NO: 199 - RNA, 21 nt, Artificial Sequence
  C3-targeting RNA guide sequence portion
cauucguccuccucaggccag

SEQ ID NO: 200 - RNA, 21 nt, Artificial Sequence
  C3-targeting RNA guide sequence portion
ccucaggccagugcuccaccc

SEQ ID NO: 201 - RNA, 21 nt, Artificial Sequence
  C3-targeting RNA guide sequence portion
ccuccucaggccagugcucca

SEQ ID NO: 202 - RNA, 21 nt, Artificial Sequence
  C3-targeting RNA guide sequence portion
ccugaggaggacgaaugccaa

SEQ ID NO: 203 - RNA, 21 nt, Artificial Sequence
  C3-targeting RNA guide sequence portion
cguccuccucaggccagugcu

SEQ ID NO: 204 - RNA, 21 nt, Artificial Sequence
  C3-targeting RNA guide sequence portion
cucaggccagugcuccaccca

SEQ ID NO: 205 - RNA, 21 nt, Artificial Sequence
  C3-targeting RNA guide sequence portion
cuccucaggccagugcuccac

SEQ ID NO: 206 - RNA, 21 nt, Artificial Sequence
  C3-targeting RNA guide sequence portion
cugaggaggacgaaugccaag

SEQ ID NO: 207 - RNA, 21 nt, Artificial Sequence
  C3-targeting RNA guide sequence portion
cuggccugaggaggacgaaug

SEQ ID NO: 208 - RNA, 21 nt, Artificial Sequence
  C3-targeting RNA guide sequence portion
cuuggcauucguccuccucag

SEQ ID NO: 209 - RNA, 21 nt, Artificial Sequence
  C3-targeting RNA guide sequence portion
cuuggguggagcacuggccug

SEQ ID NO: 210 - RNA, 21 nt, Artificial Sequence
  C3-targeting RNA guide sequence portion
gagcacuggccugaggaggac

SEQ ID NO: 211 - RNA, 21 nt, Artificial Sequence
  C3-targeting RNA guide sequence portion
gcacuggccugaggaggacga

SEQ ID NO: 212 - RNA, 21 nt, Artificial Sequence
  C3-targeting RNA guide sequence portion
gcauucguccuccucaggcca

SEQ ID NO: 213 - RNA, 21 nt, Artificial Sequence
  C3-targeting RNA guide sequence portion
gccugaggaggacgaaugcca

SEQ ID NO: 214 - RNA, 21 nt, Artificial Sequence
  C3-targeting RNA guide sequence portion
ggagcacuggccugaggagga

SEQ ID NO: 215 - RNA, 21 nt, Artificial Sequence
  C3-targeting RNA guide sequence portion
ggcauucguccuccucaggcc

SEQ ID NO: 216 - RNA, 21 nt, Artificial Sequence
  C3-targeting RNA guide sequence portion
ggccugaggaggacgaaugcc

SEQ ID NO: 217 - RNA, 21 nt, Artificial Sequence
  C3-targeting RNA guide sequence portion
ggguggagcacuggccugagg

SEQ ID NO: 218 - RNA, 21 nt, Artificial Sequence
  C3-targeting RNA guide sequence portion
gguggagcacuggccugagga

SEQ ID NO: 219 - RNA, 21 nt, Artificial Sequence
  C3-targeting RNA guide sequence portion
guccuccucaggccagugcuc

SEQ ID NO: 220 - RNA, 21 nt, Artificial Sequence
  C3-targeting RNA guide sequence portion
guggagcacuggccugaggag

SEQ ID NO: 221 - RNA, 21 nt, Artificial Sequence
  C3-targeting RNA guide sequence portion
ucaggccagugcuccacccaa

SEQ ID NO: 222 - RNA, 21 nt, Artificial Sequence
  C3-targeting RNA guide sequence portion
uccucaggccagugcuccacc

SEQ ID NO: 223 - RNA, 21 nt, Artificial Sequence
  C3-targeting RNA guide sequence portion
uccuccucaggccagugcucc

SEQ ID NO: 224 - RNA, 21 nt, Artificial Sequence
  C3-targeting RNA guide sequence portion
ucguccuccucaggccagugc

SEQ ID NO: 225 - RNA, 21 nt, Artificial Sequence
  C3-targeting RNA guide sequence portion
ucuuggcauucguccuccuca

SEQ ID NO: 226 - RNA, 21 nt, Artificial Sequence
  C3-targeting RNA guide sequence portion
uggagcacuggccugaggagg

SEQ ID NO: 227 - RNA, 21 nt, Artificial Sequence
  C3-targeting RNA guide sequence portion
uggcauucguccuccucaggc

SEQ ID NO: 228 - RNA, 21 nt, Artificial Sequence
  C3-targeting RNA guide sequence portion
uggccugaggaggacgaaugc

SEQ ID NO: 229 - RNA, 21 nt, Artificial Sequence
  C3-targeting RNA guide sequence portion
uggguggagcacuggccugag

SEQ ID NO: 230 - RNA, 21 nt, Artificial Sequence
  C3-targeting RNA guide sequence portion
uucguccuccucaggccagug

SEQ ID NO: 231 - RNA, 21 nt, Artificial Sequence
  C3-targeting RNA guide sequence portion
uuggcauucguccuccucagg

SEQ ID NO: 232 - RNA, 21 nt, Artificial Sequence
  C3-targeting RNA guide sequence portion
uuggguggagcacuggccuga

SEQ ID NO: 233 - RNA, 22 nt, Artificial Sequence
  C3-targeting RNA guide sequence portion
acuggccugaggaggacgaaug

SEQ ID NO: 234 - RNA, 22 nt, Artificial Sequence
  C3-targeting RNA guide sequence portion
acuuggguggagcacuggccug

SEQ ID NO: 235 - RNA, 22 nt, Artificial Sequence
  C3-targeting RNA guide sequence portion
agcacuggccugaggaggacga

SEQ ID NO: 236 - RNA, 22 nt, Artificial Sequence
  C3-targeting RNA guide sequence portion
auucguccuccucaggccagug

SEQ ID NO: 237 - RNA, 22 nt, Artificial Sequence
  C3-targeting RNA guide sequence portion
cacuggccugaggaggacgaau

SEQ ID NO: 238 - RNA, 22 nt, Artificial Sequence
  C3-targeting RNA guide sequence portion
cacuuggguggagcacuggccu

SEQ ID NO: 239 - RNA, 22 nt, Artificial Sequence
  C3-targeting RNA guide sequence portion
caggccagugcuccacccaagu

SEQ ID NO: 240 - RNA, 22 nt, Artificial Sequence
  C3-targeting RNA guide sequence portion
cauucguccuccucaggccagu

SEQ ID NO: 241 - RNA, 22 nt, Artificial Sequence
  C3-targeting RNA guide sequence portion
ccucaggccagugcuccaccca

SEQ ID NO: 242 - RNA, 22 nt, Artificial Sequence
  C3-targeting RNA guide sequence portion
ccuccucaggccagugcuccac

SEQ ID NO: 243 - RNA, 22 nt, Artificial Sequence
  C3-targeting RNA guide sequence portion
ccugaggaggacgaaugccaag

SEQ ID NO: 244 - RNA, 22 nt, Artificial Sequence
  C3-targeting RNA guide sequence portion
cguccuccucaggccagugcuc

SEQ ID NO: 245 - RNA, 22 nt, Artificial Sequence
  C3-targeting RNA guide sequence portion
cucaggccagugcuccacccaa

SEQ ID NO: 246 - RNA, 22 nt, Artificial Sequence
  C3-targeting RNA guide sequence portion
cuccucaggccagugcuccacc

SEQ ID NO: 247 - RNA, 22 nt, Artificial Sequence
  C3-targeting RNA guide sequence portion
cugaggaggacgaaugccaaga

SEQ ID NO: 248 - RNA, 22 nt, Artificial Sequence
  C3-targeting RNA guide sequence portion
cuggccugaggaggacgaaugc

SEQ ID NO: 249 - RNA, 22 nt, Artificial Sequence
  C3-targeting RNA guide sequence portion
cuuggcauucguccuccucagg

SEQ ID NO: 250 - RNA, 22 nt, Artificial Sequence
  C3-targeting RNA guide sequence portion
cuuggguggagcacuggccuga

SEQ ID NO: 251 - RNA, 22 nt, Artificial Sequence
  C3-targeting RNA guide sequence portion
gagcacuggccugaggaggacg

SEQ ID NO: 252 - RNA, 22 nt, Artificial Sequence
  C3-targeting RNA guide sequence portion
gcacuggccugaggaggacgaa

SEQ ID NO: 253 - RNA, 22 nt, Artificial Sequence
  C3-targeting RNA guide sequence portion
gcauucguccuccucaggccag

SEQ ID NO: 254 - RNA, 22 nt, Artificial Sequence
  C3-targeting RNA guide sequence portion
gccugaggaggacgaaugccaa

SEQ ID NO: 255 - RNA, 22 nt, Artificial Sequence
  C3-targeting RNA guide sequence portion
ggagcacuggccugaggaggac

SEQ ID NO: 256 - RNA, 22 nt, Artificial Sequence
  C3-targeting RNA guide sequence portion
ggcauucguccuccucaggcca

SEQ ID NO: 257 - RNA, 22 nt, Artificial Sequence
  C3-targeting RNA guide sequence portion
ggccugaggaggacgaaugcca

SEQ ID NO: 258 - RNA, 22 nt, Artificial Sequence
  C3-targeting RNA guide sequence portion
ggguggagcacuggccugagga

SEQ ID NO: 259 - RNA, 22 nt, Artificial Sequence
  C3-targeting RNA guide sequence portion
gguggagcacuggccugaggag

SEQ ID NO: 260 - RNA, 22 nt, Artificial Sequence
  C3-targeting RNA guide sequence portion
guccuccucaggccagugcucc

SEQ ID NO: 261 - RNA, 22 nt, Artificial Sequence
  C3-targeting RNA guide sequence portion
gucuuggcauucguccuccuca

SEQ ID NO: 262 - RNA, 22 nt, Artificial Sequence
  C3-targeting RNA guide sequence portion
guggagcacuggccugaggagg

SEQ ID NO: 263 - RNA, 22 nt, Artificial Sequence
  C3-targeting RNA guide sequence portion
ucaggccagugcuccacccaag

SEQ ID NO: 264 - RNA, 22 nt, Artificial Sequence
  C3-targeting RNA guide sequence portion
uccucaggccagugcuccaccc

SEQ ID NO: 265 - RNA, 22 nt, Artificial Sequence
  C3-targeting RNA guide sequence portion
uccuccucaggccagugcucca

SEQ ID NO: 266 - RNA, 22 nt, Artificial Sequence
  C3-targeting RNA guide sequence portion
ucguccuccucaggccagugcu

SEQ ID NO: 267 - RNA, 22 nt, Artificial Sequence
  C3-targeting RNA guide sequence portion
ucuuggcauucguccuccucag

SEQ ID NO: 268 - RNA, 22 nt, Artificial Sequence
  C3-targeting RNA guide sequence portion
uggagcacuggccugaggagga

SEQ ID NO: 269 - RNA, 22 nt, Artificial Sequence
  C3-targeting RNA guide sequence portion
uggcauucguccuccucaggcc

SEQ ID NO: 270 - RNA, 22 nt, Artificial Sequence
  C3-targeting RNA guide sequence portion
uggccugaggaggacgaaugcc

SEQ ID NO: 271 - RNA, 22 nt, Artificial Sequence
  C3-targeting RNA guide sequence portion
uggguggagcacuggccugagg

SEQ ID NO: 272 - RNA, 22 nt, Artificial Sequence
  C3-targeting RNA guide sequence portion
uucguccuccucaggccagugc

SEQ ID NO: 273 - RNA, 22 nt, Artificial Sequence
  C3-targeting RNA guide sequence portion
uuggcauucguccuccucaggc

SEQ ID NO: 274 - RNA, 22 nt, Artificial Sequence
  C3-targeting RNA guide sequence portion
uuggguggagcacuggccugag

SEQ ID NO: 275 - RNA, 20 nt, Artificial Sequence
  C3-targeting RNA guide sequence portion
aaacacccccaaccgcacca

SEQ ID NO: 276 - RNA, 20 nt, Artificial Sequence
  C3-targeting RNA guide sequence portion
aaaccuccgagucuccaaac

SEQ ID NO: 277 - RNA, 20 nt, Artificial Sequence
  C3-targeting RNA guide sequence portion
aaaguccaaaccuccgaguc

SEQ ID NO: 278 - RNA, 20 nt, Artificial Sequence
  C3-targeting RNA guide sequence portion
aacacccccaaccgcaccau

SEQ ID NO: 279 - RNA, 20 nt, Artificial Sequence
  C3-targeting RNA guide sequence portion
aaccuccgagucuccaaaca

SEQ ID NO: 280 - RNA, 20 nt, Artificial Sequence
  C3-targeting RNA guide sequence portion
aaguccaaaccuccgagucu

SEQ ID NO: 281 - RNA, 20 nt, Artificial Sequence
  C3-targeting RNA guide sequence portion
accuccgagucuccaaacac

SEQ ID NO: 282 - RNA, 20 nt, Artificial Sequence
  C3-targeting RNA guide sequence portion
aguccaaaccuccgagucuc

SEQ ID NO: 283 - RNA, 20 nt, Artificial Sequence
  C3-targeting RNA guide sequence portion
agucuccaaacacccccaac

SEQ ID NO: 284 - RNA, 20 nt, Artificial Sequence
  C3-targeting RNA guide sequence portion
auggugcgguuggggguguu

SEQ ID NO: 285 - RNA, 20 nt, Artificial Sequence
  C3-targeting RNA guide sequence portion
auugauggugcgguuggggg

SEQ ID NO: 286 - RNA, 20 nt, Artificial Sequence
  C3-targeting RNA guide sequence portion
caaacacccccaaccgcacc

SEQ ID NO: 287 - RNA, 20 nt, Artificial Sequence
  C3-targeting RNA guide sequence portion
caaaccuccgagucuccaaa

SEQ ID NO: 288 - RNA, 20 nt, Artificial Sequence
  C3-targeting RNA guide sequence portion
cauugauggugcgguugggg

SEQ ID NO: 289 - RNA, 20 nt, Artificial Sequence
  C3-targeting RNA guide sequence portion
ccaaacacccccaaccgcac

SEQ ID NO: 290 - RNA, 20 nt, Artificial Sequence
  C3-targeting RNA guide sequence portion
ccaaaccuccgagucuccaa

SEQ ID NO: 291 - RNA, 20 nt, Artificial Sequence
  C3-targeting RNA guide sequence portion
ccgagucuccaaacaccccc

SEQ ID NO: 292 - RNA, 20 nt, Artificial Sequence
  C3-targeting RNA guide sequence portion
ccuccgagucuccaaacacc

SEQ ID NO: 293 - RNA, 20 nt, Artificial Sequence
  C3-targeting RNA guide sequence portion
cgagucuccaaacaccccca

SEQ ID NO: 294 - RNA, 20 nt, Artificial Sequence
  C3-targeting RNA guide sequence portion
cgguuggggguguuuggaga

SEQ ID NO: 295 - RNA, 20 nt, Artificial Sequence
  C3-targeting RNA guide sequence portion
cuccaaacacccccaaccgc

SEQ ID NO: 296 - RNA, 20 nt, Artificial Sequence
  C3-targeting RNA guide sequence portion
cuccgagucuccaaacaccc

SEQ ID NO: 297 - RNA, 20 nt, Artificial Sequence
  C3-targeting RNA guide sequence portion
gagucuccaaacacccccaa

SEQ ID NO: 298 - RNA, 20 nt, Artificial Sequence
  C3-targeting RNA guide sequence portion
gauggugcgguugggggugu

SEQ ID NO: 299 - RNA, 20 nt, Artificial Sequence
  C3-targeting RNA guide sequence portion
gcgguuggggguguuuggag

SEQ ID NO: 300 - RNA, 20 nt, Artificial Sequence
  C3-targeting RNA guide sequence portion
ggggguguuuggagacucgg

SEQ ID NO: 301 - RNA, 20 nt, Artificial Sequence
  C3-targeting RNA guide sequence portion
gggguguuuggagacucgga

SEQ ID NO: 302 - RNA, 20 nt, Artificial Sequence
  C3-targeting RNA guide sequence portion
ggguguuuggagacucggag

SEQ ID NO: 303 - RNA, 20 nt, Artificial Sequence
  C3-targeting RNA guide sequence portion
ggugcgguuggggguguuug

SEQ ID NO: 304 - RNA, 20 nt, Artificial Sequence
  C3-targeting RNA guide sequence portion
gguguuuggagacucggagg

SEQ ID NO: 305 - RNA, 20 nt, Artificial Sequence
  C3-targeting RNA guide sequence portion
gguuggggguguuuggagac

SEQ ID NO: 306 - RNA, 20 nt, Artificial Sequence
  C3-targeting RNA guide sequence portion
guccaaaccuccgagucucc

SEQ ID NO: 307 - RNA, 20 nt, Artificial Sequence
  C3-targeting RNA guide sequence portion
gucuccaaacacccccaacc

SEQ ID NO: 308 - RNA, 20 nt, Artificial Sequence
  C3-targeting RNA guide sequence portion
gugcgguuggggguguuugg

SEQ ID NO: 309 - RNA, 20 nt, Artificial Sequence
  C3-targeting RNA guide sequence portion
guguuuggagacucggaggu

SEQ ID NO: 310 - RNA, 20 nt, Artificial Sequence
  C3-targeting RNA guide sequence portion
guuggggguguuuggagacu

SEQ ID NO: 311 - RNA, 20 nt, Artificial Sequence
  C3-targeting RNA guide sequence portion
guuuggagacucggagguuu

SEQ ID NO: 312 - RNA, 20 nt, Artificial Sequence
  C3-targeting RNA guide sequence portion
ucauugauggugcgguuggg

SEQ ID NO: 313 - RNA, 20 nt, Artificial Sequence
  C3-targeting RNA guide sequence portion
uccaaacacccccaaccgca

SEQ ID NO: 314 - RNA, 20 nt, Artificial Sequence
  C3-targeting RNA guide sequence portion
uccaaaccuccgagucucca

SEQ ID NO: 315 - RNA, 20 nt, Artificial Sequence
  C3-targeting RNA guide sequence portion
uccgagucuccaaacacccc

SEQ ID NO: 316 - RNA, 20 nt, Artificial Sequence
  C3-targeting RNA guide sequence portion
ucuccaaacacccccaaccg

SEQ ID NO: 317 - RNA, 20 nt, Artificial Sequence
  C3-targeting RNA guide sequence portion
ugauggugcgguugggggug

SEQ ID NO: 318 - RNA, 20 nt, Artificial Sequence
  C3-targeting RNA guide sequence portion
ugcgguuggggguguuugga

SEQ ID NO: 319 - RNA, 20 nt, Artificial Sequence
  C3-targeting RNA guide sequence portion
uggggguguuuggagacucg

SEQ ID NO: 320 - RNA, 20 nt, Artificial Sequence
  C3-targeting RNA guide sequence portion
uggugcgguuggggguguuu

SEQ ID NO: 321 - RNA, 20 nt, Artificial Sequence
  C3-targeting RNA guide sequence portion
uguuuggagacucggagguu

SEQ ID NO: 322 - RNA, 20 nt, Artificial Sequence
  C3-targeting RNA guide sequence portion
uucauugauggugcgguugg

SEQ ID NO: 323 - RNA, 20 nt, Artificial Sequence
  C3-targeting RNA guide sequence portion
uugauggugcgguugggggu

SEQ ID NO: 324 - RNA, 20 nt, Artificial Sequence
  C3-targeting RNA guide sequence portion
uuggggguguuuggagacuc

SEQ ID NO: 325 - RNA, 21 nt, Artificial Sequence
  C3-targeting RNA guide sequence portion
aaacacccccaaccgcaccau

SEQ ID NO: 326 - RNA, 21 nt, Artificial Sequence
  C3-targeting RNA guide sequence portion
aaaccuccgagucuccaaaca

SEQ ID NO: 327 - RNA, 21 nt, Artificial Sequence
  C3-targeting RNA guide sequence portion
aaaguccaaaccuccgagucu

SEQ ID NO: 328 - RNA, 21 nt, Artificial Sequence
  C3-targeting RNA guide sequence portion
aacacccccaaccgcaccauc

SEQ ID NO: 329 - RNA, 21 nt, Artificial Sequence
  C3-targeting RNA guide sequence portion
aaccuccgagucuccaaacac

SEQ ID NO: 330 - RNA, 21 nt, Artificial Sequence
  C3-targeting RNA guide sequence portion
aaguccaaaccuccgagucuc

SEQ ID NO: 331 - RNA, 21 nt, Artificial Sequence
  C3-targeting RNA guide sequence portion
accuccgagucuccaaacacc

SEQ ID NO: 332 - RNA, 21 nt, Artificial Sequence
  C3-targeting RNA guide sequence portion
aguccaaaccuccgagucucc

SEQ ID NO: 333 - RNA, 21 nt, Artificial Sequence
  C3-targeting RNA guide sequence portion
agucuccaaacacccccaacc

SEQ ID NO: 334 - RNA, 21 nt, Artificial Sequence
  C3-targeting RNA guide sequence portion
auggugcgguuggggguguuu

SEQ ID NO: 335 - RNA, 21 nt, Artificial Sequence
  C3-targeting RNA guide sequence portion
auugauggugcgguugggggu

SEQ ID NO: 336 - RNA, 21 nt, Artificial Sequence
  C3-targeting RNA guide sequence portion
caaacacccccaaccgcacca

SEQ ID NO: 337 - RNA, 21 nt, Artificial Sequence
  C3-targeting RNA guide sequence portion
caaaccuccgagucuccaaac

SEQ ID NO: 338 - RNA, 21 nt, Artificial Sequence
  C3-targeting RNA guide sequence portion
cauugauggugcgguuggggg

SEQ ID NO: 339 - RNA, 21 nt, Artificial Sequence
  C3-targeting RNA guide sequence portion
ccaaacacccccaaccgcacc

SEQ ID NO: 340 - RNA, 21 nt, Artificial Sequence
  C3-targeting RNA guide sequence portion
ccaaaccuccgagucuccaaa

SEQ ID NO: 341 - RNA, 21 nt, Artificial Sequence
  C3-targeting RNA guide sequence portion
ccgagucuccaaacaccccca

SEQ ID NO: 342 - RNA, 21 nt, Artificial Sequence
  C3-targeting RNA guide sequence portion
ccuccgagucuccaaacaccc

SEQ ID NO: 343 - RNA, 21 nt, Artificial Sequence
  C3-targeting RNA guide sequence portion
cgagucuccaaacacccccaa

SEQ ID NO: 344 - RNA, 21 nt, Artificial Sequence
  C3-targeting RNA guide sequence portion
cgguuggggguguuuggagac

SEQ ID NO: 345 - RNA, 21 nt, Artificial Sequence
  C3-targeting RNA guide sequence portion
cuccaaacacccccaaccgca

SEQ ID NO: 346 - RNA, 21 nt, Artificial Sequence
  C3-targeting RNA guide sequence portion
cuccgagucuccaaacacccc

SEQ ID NO: 347 - RNA, 21 nt, Artificial Sequence
  C3-targeting RNA guide sequence portion
gagucuccaaacacccccaac

SEQ ID NO: 348 - RNA, 21 nt, Artificial Sequence
  C3-targeting RNA guide sequence portion
gauggugcgguuggggguguu

SEQ ID NO: 349 - RNA, 21 nt, Artificial Sequence
  C3-targeting RNA guide sequence portion
gcgguuggggguguuuggaga

SEQ ID NO: 350 - RNA, 21 nt, Artificial Sequence
  C3-targeting RNA guide sequence portion
ggggguguuuggagacucgga

SEQ ID NO: 351 - RNA, 21 nt, Artificial Sequence
  C3-targeting RNA guide sequence portion
gggguguuuggagacucggag

SEQ ID NO: 352 - RNA, 21 nt, Artificial Sequence
  C3-targeting RNA guide sequence portion
ggguguuuggagacucggagg

SEQ ID NO: 353 - RNA, 21 nt, Artificial Sequence
  C3-targeting RNA guide sequence portion
ggugcgguuggggguguuugg

SEQ ID NO: 354 - RNA, 21 nt, Artificial Sequence
  C3-targeting RNA guide sequence portion
gguguuuggagacucggaggu

SEQ ID NO: 355 - RNA, 21 nt, Artificial Sequence
  C3-targeting RNA guide sequence portion
gguuggggguguuuggagacu

SEQ ID NO: 356 - RNA, 21 nt, Artificial Sequence
  C3-targeting RNA guide sequence portion
guccaaaccuccgagucucca

SEQ ID NO: 357 - RNA, 21 nt, Artificial Sequence
  C3-targeting RNA guide sequence portion
gucuccaaacacccccaaccg

SEQ ID NO: 358 - RNA, 21 nt, Artificial Sequence
  C3-targeting RNA guide sequence portion
gugcgguuggggguguuugga

SEQ ID NO: 359 - RNA, 21 nt, Artificial Sequence
  C3-targeting RNA guide sequence portion
guguuuggagacucggagguu

SEQ ID NO: 360 - RNA, 21 nt, Artificial Sequence
  C3-targeting RNA guide sequence portion
guucauugauggugcgguugg

SEQ ID NO: 361 - RNA, 21 nt, Artificial Sequence
  C3-targeting RNA guide sequence portion
guuggggguguuuggagacuc

SEQ ID NO: 362 - RNA, 21 nt, Artificial Sequence
  C3-targeting RNA guide sequence portion
guuuggagacucggagguuug

SEQ ID NO: 363 - RNA, 21 nt, Artificial Sequence
  C3-targeting RNA guide sequence portion
uaaaguccaaaccuccgaguc

SEQ ID NO: 364 - RNA, 21 nt, Artificial Sequence
  C3-targeting RNA guide sequence portion
ucauugauggugcgguugggg

SEQ ID NO: 365 - RNA, 21 nt, Artificial Sequence
  C3-targeting RNA guide sequence portion
uccaaacacccccaaccgcac

SEQ ID NO: 366 - RNA, 21 nt, Artificial Sequence
  C3-targeting RNA guide sequence portion
uccaaaccuccgagucuccaa

SEQ ID NO: 367 - RNA, 21 nt, Artificial Sequence
  C3-targeting RNA guide sequence portion
uccgagucuccaaacaccccc

SEQ ID NO: 368 - RNA, 21 nt, Artificial Sequence
  C3-targeting RNA guide sequence portion
ucuccaaacacccccaaccgc

SEQ ID NO: 369 - RNA, 21 nt, Artificial Sequence
  C3-targeting RNA guide sequence portion
ugauggugcgguugggggugu

SEQ ID NO: 370 - RNA, 21 nt, Artificial Sequence
  C3-targeting RNA guide sequence portion
ugcgguuggggguguuuggag

SEQ ID NO: 371 - RNA, 21 nt, Artificial Sequence
  C3-targeting RNA guide sequence portion
uggggguguuuggagacucgg

SEQ ID NO: 372 - RNA, 21 nt, Artificial Sequence
  C3-targeting RNA guide sequence portion
uggugcgguuggggguguuug

SEQ ID NO: 373 - RNA, 21 nt, Artificial Sequence
  C3-targeting RNA guide sequence portion
uguuuggagacucggagguuu

SEQ ID NO: 374 - RNA, 21 nt, Artificial Sequence
  C3-targeting RNA guide sequence portion
uucauugauggugcgguuggg

SEQ ID NO: 375 - RNA, 21 nt, Artificial Sequence
  C3-targeting RNA guide sequence portion
uugauggugcgguugggggug

SEQ ID NO: 376 - RNA, 21 nt, Artificial Sequence
  C3-targeting RNA guide sequence portion
uuggggguguuuggagacucg

SEQ ID NO: 377 - RNA, 22 nt, Artificial Sequence
  C3-targeting RNA guide sequence portion
aaacacccccaaccgcaccauc

SEQ ID NO: 378 - RNA, 22 nt, Artificial Sequence
  C3-targeting RNA guide sequence portion
aaaccuccgagucuccaaacac

SEQ ID NO: 379 - RNA, 22 nt, Artificial Sequence
  C3-targeting RNA guide sequence portion
aaaguccaaaccuccgagucuc

SEQ ID NO: 380 - RNA, 22 nt, Artificial Sequence
  C3-targeting RNA guide sequence portion
aacacccccaaccgcaccauca

SEQ ID NO: 381 - RNA, 22 nt, Artificial Sequence
  C3-targeting RNA guide sequence portion
aaccuccgagucuccaaacacc

SEQ ID NO: 382 - RNA, 22 nt, Artificial Sequence
  C3-targeting RNA guide sequence portion
aaguccaaaccuccgagucucc

SEQ ID NO: 383 - RNA, 22 nt, Artificial Sequence
  C3-targeting RNA guide sequence portion
accuccgagucuccaaacaccc

SEQ ID NO: 384 - RNA, 22 nt, Artificial Sequence
  C3-targeting RNA guide sequence portion
aguccaaaccuccgagucucca

SEQ ID NO: 385 - RNA, 22 nt, Artificial Sequence
  C3-targeting RNA guide sequence portion
agucuccaaacacccccaaccg

SEQ ID NO: 386 - RNA, 22 nt, Artificial Sequence
  C3-targeting RNA guide sequence portion
auggugcgguuggggguguuug

SEQ ID NO: 387 - RNA, 22 nt, Artificial Sequence
  C3-targeting RNA guide sequence portion
auugauggugcgguugggggug

SEQ ID NO: 388 - RNA, 22 nt, Artificial Sequence
  C3-targeting RNA guide sequence portion
caaacacccccaaccgcaccau

SEQ ID NO: 389 - RNA, 22 nt, Artificial Sequence
  C3-targeting RNA guide sequence portion
caaaccuccgagucuccaaaca

SEQ ID NO: 390 - RNA, 22 nt, Artificial Sequence
  C3-targeting RNA guide sequence portion
cauugauggugcgguugggggu

SEQ ID NO: 391 - RNA, 22 nt, Artificial Sequence
  C3-targeting RNA guide sequence portion
ccaaacacccccaaccgcacca

SEQ ID NO: 392 - RNA, 22 nt, Artificial Sequence
  C3-targeting RNA guide sequence portion
ccaaaccuccgagucuccaaac

SEQ ID NO: 393 - RNA, 22 nt, Artificial Sequence
  C3-targeting RNA guide sequence portion
ccgagucuccaaacacccccaa

SEQ ID NO: 394 - RNA, 22 nt, Artificial Sequence
  C3-targeting RNA guide sequence portion
ccuccgagucuccaaacacccc

SEQ ID NO: 395 - RNA, 22 nt, Artificial Sequence
  C3-targeting RNA guide sequence portion
cgagucuccaaacacccccaac

SEQ ID NO: 396 - RNA, 22 nt, Artificial Sequence
  C3-targeting RNA guide sequence portion
cgguuggggguguuuggagacu

SEQ ID NO: 397 - RNA, 22 nt, Artificial Sequence
  C3-targeting RNA guide sequence portion
cuccaaacacccccaaccgcac

SEQ ID NO: 398 - RNA, 22 nt, Artificial Sequence
  C3-targeting RNA guide sequence portion
cuccgagucuccaaacaccccc

SEQ ID NO: 399 - RNA, 22 nt, Artificial Sequence
  C3-targeting RNA guide sequence portion
gagucuccaaacacccccaacc

SEQ ID NO: 400 - RNA, 22 nt, Artificial Sequence
  C3-targeting RNA guide sequence portion
gauggugcgguuggggguguuu

SEQ ID NO: 401 - RNA, 22 nt, Artificial Sequence
  C3-targeting RNA guide sequence portion
gcgguuggggguguuuggagac

SEQ ID NO: 402 - RNA, 22 nt, Artificial Sequence
  C3-targeting RNA guide sequence portion
ggggguguuuggagacucggag

SEQ ID NO: 403 - RNA, 22 nt, Artificial Sequence
  C3-targeting RNA guide sequence portion
gggguguuuggagacucggagg

SEQ ID NO: 404 - RNA, 22 nt, Artificial Sequence
  C3-targeting RNA guide sequence portion
ggguguuuggagacucggaggu

SEQ ID NO: 405 - RNA, 22 nt, Artificial Sequence
  C3-targeting RNA guide sequence portion
ggugcgguuggggguguuugga

SEQ ID NO: 406 - RNA, 22 nt, Artificial Sequence
  C3-targeting RNA guide sequence portion
gguguuuggagacucggagguu

SEQ ID NO: 407 - RNA, 22 nt, Artificial Sequence
  C3-targeting RNA guide sequence portion
gguuggggguguuuggagacuc

SEQ ID NO: 408 - RNA, 22 nt, Artificial Sequence
  C3-targeting RNA guide sequence portion
guaaaguccaaaccuccgaguc

SEQ ID NO: 409 - RNA, 22 nt, Artificial Sequence
  C3-targeting RNA guide sequence portion
guccaaaccuccgagucuccaa

SEQ ID NO: 410 - RNA, 22 nt, Artificial Sequence
  C3-targeting RNA guide sequence portion
gucuccaaacacccccaaccgc

SEQ ID NO: 411 - RNA, 22 nt, Artificial Sequence
  C3-targeting RNA guide sequence portion
gugcgguuggggguguuuggag

SEQ ID NO: 412 - RNA, 22 nt, Artificial Sequence
  C3-targeting RNA guide sequence portion
guguuuggagacucggagguuu

SEQ ID NO: 413 - RNA, 22 nt, Artificial Sequence
  C3-targeting RNA guide sequence portion
guucauugauggugcgguuggg

SEQ ID NO: 414 - RNA, 22 nt, Artificial Sequence
  C3-targeting RNA guide sequence portion
guuggggguguuuggagacucg

SEQ ID NO: 415 - RNA, 22 nt, Artificial Sequence
  C3-targeting RNA guide sequence portion
guuuggagacucggagguuugg

SEQ ID NO: 416 - RNA, 22 nt, Artificial Sequence
  C3-targeting RNA guide sequence portion
uaaaguccaaaccuccgagucu

SEQ ID NO: 417 - RNA, 22 nt, Artificial Sequence
  C3-targeting RNA guide sequence portion
ucauugauggugcgguuggggg

SEQ ID NO: 418 - RNA, 22 nt, Artificial Sequence
  C3-targeting RNA guide sequence portion
uccaaacacccccaaccgcacc

SEQ ID NO: 419 - RNA, 22 nt, Artificial Sequence
  C3-targeting RNA guide sequence portion
uccaaaccuccgagucuccaaa

SEQ ID NO: 420 - RNA, 22 nt, Artificial Sequence
  C3-targeting RNA guide sequence portion
uccgagucuccaaacaccccca

SEQ ID NO: 421 - RNA, 22 nt, Artificial Sequence
  C3-targeting RNA guide sequence portion
ucuccaaacacccccaaccgca

SEQ ID NO: 422 - RNA, 22 nt, Artificial Sequence
  C3-targeting RNA guide sequence portion
ugauggugcgguuggggguguu

SEQ ID NO: 423 - RNA, 22 nt, Artificial Sequence
  C3-targeting RNA guide sequence portion
ugcgguuggggguguuuggaga

SEQ ID NO: 424 - RNA, 22 nt, Artificial Sequence
  C3-targeting RNA guide sequence portion
uggggguguuuggagacucgga

SEQ ID NO: 425 - RNA, 22 nt, Artificial Sequence
  C3-targeting RNA guide sequence portion
uggugcgguuggggguguuugg

SEQ ID NO: 426 - RNA, 22 nt, Artificial Sequence
  C3-targeting RNA guide sequence portion
uguucauugauggugcgguugg

SEQ ID NO: 427 - RNA, 22 nt, Artificial Sequence
  C3-targeting RNA guide sequence portion
uguuuggagacucggagguuug

SEQ ID NO: 428 - RNA, 22 nt, Artificial Sequence
  C3-targeting RNA guide sequence portion
uucauugauggugcgguugggg

SEQ ID NO: 429 - RNA, 22 nt, Artificial Sequence
  C3-targeting RNA guide sequence portion
uugauggugcgguugggggugu

SEQ ID NO: 430 - RNA, 22 nt, Artificial Sequence
  C3-targeting RNA guide sequence portion
uuggggguguuuggagacucgg

SEQ ID NO: 431 - RNA, 20 nt, Artificial Sequence
  C3-targeting RNA guide sequence portion
aaaccuccgagucuccaaau

SEQ ID NO: 432 - RNA, 20 nt, Artificial Sequence
  C3-targeting RNA guide sequence portion
aaaucacccccaaccgcacc

SEQ ID NO: 433 - RNA, 20 nt, Artificial Sequence
  C3-targeting RNA guide sequence portion
aaccuccgagucuccaaauc

SEQ ID NO: 434 - RNA, 20 nt, Artificial Sequence
  C3-targeting RNA guide sequence portion
aaucacccccaaccgcacca

SEQ ID NO: 435 - RNA, 20 nt, Artificial Sequence
  C3-targeting RNA guide sequence portion
accuccgagucuccaaauca

SEQ ID NO: 436 - RNA, 20 nt, Artificial Sequence
  C3-targeting RNA guide sequence portion
agucuccaaaucacccccaa

SEQ ID NO: 437 - RNA, 20 nt, Artificial Sequence
  C3-targeting RNA guide sequence portion
auggugcgguugggggugau

SEQ ID NO: 438 - RNA, 20 nt, Artificial Sequence
  C3-targeting RNA guide sequence portion
auuuggagacucggagguuu

SEQ ID NO: 439 - RNA, 20 nt, Artificial Sequence
  C3-targeting RNA guide sequence portion
caaaucacccccaaccgcac

SEQ ID NO: 440 - RNA, 20 nt, Artificial Sequence
  C3-targeting RNA guide sequence portion
ccaaaucacccccaaccgca

SEQ ID NO: 441 - RNA, 20 nt, Artificial Sequence
  C3-targeting RNA guide sequence portion
ccgagucuccaaaucacccc

SEQ ID NO: 442 - RNA, 20 nt, Artificial Sequence
  C3-targeting RNA guide sequence portion
ccuccgagucuccaaaucac

SEQ ID NO: 443 - RNA, 20 nt, Artificial Sequence
  C3-targeting RNA guide sequence portion
cgagucuccaaaucaccccc

SEQ ID NO: 444 - RNA, 20 nt, Artificial Sequence
  C3-targeting RNA guide sequence portion
cgguugggggugauuuggag

SEQ ID NO: 445 - RNA, 20 nt, Artificial Sequence
  C3-targeting RNA guide sequence portion
cuccaaaucacccccaaccg

SEQ ID NO: 446 - RNA, 20 nt, Artificial Sequence
  C3-targeting RNA guide sequence portion
cuccgagucuccaaaucacc

SEQ ID NO: 447 - RNA, 20 nt, Artificial Sequence
  C3-targeting RNA guide sequence portion
gagucuccaaaucaccccca

SEQ ID NO: 448 - RNA, 20 nt, Artificial Sequence
  C3-targeting RNA guide sequence portion
gauggugcgguuggggguga

SEQ ID NO: 449 - RNA, 20 nt, Artificial Sequence
  C3-targeting RNA guide sequence portion
gauuuggagacucggagguu

SEQ ID NO: 450 - RNA, 20 nt, Artificial Sequence
  C3-targeting RNA guide sequence portion
gcgguugggggugauuugga

SEQ ID NO: 451 - RNA, 20 nt, Artificial Sequence
  C3-targeting RNA guide sequence portion
gggggugauuuggagacucg

SEQ ID NO: 452 - RNA, 20 nt, Artificial Sequence
  C3-targeting RNA guide sequence portion
ggggugauuuggagacucgg

SEQ ID NO: 453 - RNA, 20 nt, Artificial Sequence
  C3-targeting RNA guide sequence portion
gggugauuuggagacucgga

SEQ ID NO: 454 - RNA, 20 nt, Artificial Sequence
  C3-targeting RNA guide sequence portion
ggugauuuggagacucggag

SEQ ID NO: 455 - RNA, 20 nt, Artificial Sequence
  C3-targeting RNA guide sequence portion
ggugcgguugggggugauuu

SEQ ID NO: 456 - RNA, 20 nt, Artificial Sequence
  C3-targeting RNA guide sequence portion
gguugggggugauuuggaga

SEQ ID NO: 457 - RNA, 20 nt, Artificial Sequence
  C3-targeting RNA guide sequence portion
gucuccaaaucacccccaac

SEQ ID NO: 458 - RNA, 20 nt, Artificial Sequence
  C3-targeting RNA guide sequence portion
gugauuuggagacucggagg

SEQ ID NO: 459 - RNA, 20 nt, Artificial Sequence
  C3-targeting RNA guide sequence portion
gugcgguugggggugauuug

SEQ ID NO: 460 - RNA, 20 nt, Artificial Sequence
  C3-targeting RNA guide sequence portion
guugggggugauuuggagac

SEQ ID NO: 461 - RNA, 20 nt, Artificial Sequence
  C3-targeting RNA guide sequence portion
uccaaaucacccccaaccgc

SEQ ID NO: 462 - RNA, 20 nt, Artificial Sequence
  C3-targeting RNA guide sequence portion
uccgagucuccaaaucaccc

SEQ ID NO: 463 - RNA, 20 nt, Artificial Sequence
  C3-targeting RNA guide sequence portion
ucuccaaaucacccccaacc

SEQ ID NO: 464 - RNA, 20 nt, Artificial Sequence
  C3-targeting RNA guide sequence portion
ugauuuggagacucggaggu

SEQ ID NO: 465 - RNA, 20 nt, Artificial Sequence
  C3-targeting RNA guide sequence portion
ugcgguugggggugauuugg

SEQ ID NO: 466 - RNA, 20 nt, Artificial Sequence
  C3-targeting RNA guide sequence portion
ugggggugauuuggagacuc

SEQ ID NO: 467 - RNA, 20 nt, Artificial Sequence
  C3-targeting RNA guide sequence portion
uggugcgguugggggugauu

SEQ ID NO: 468 - RNA, 20 nt, Artificial Sequence
  C3-targeting RNA guide sequence portion
uugggggugauuuggagacu

SEQ ID NO: 469 - RNA, 21 nt, Artificial Sequence
  C3-targeting RNA guide sequence portion
aaaccuccgagucuccaaauc

SEQ ID NO: 470 - RNA, 21 nt, Artificial Sequence
  C3-targeting RNA guide sequence portion
aaaucacccccaaccgcacca

SEQ ID NO: 471 - RNA, 21 nt, Artificial Sequence
  C3-targeting RNA guide sequence portion
aaccuccgagucuccaaauca

SEQ ID NO: 472 - RNA, 21 nt, Artificial Sequence
  C3-targeting RNA guide sequence portion
aaucacccccaaccgcaccau

SEQ ID NO: 473 - RNA, 21 nt, Artificial Sequence
  C3-targeting RNA guide sequence portion
accuccgagucuccaaaucac

SEQ ID NO: 474 - RNA, 21 nt, Artificial Sequence
  C3-targeting RNA guide sequence portion
agucuccaaaucacccccaac

SEQ ID NO: 475 - RNA, 21 nt, Artificial Sequence
  C3-targeting RNA guide sequence portion
auggugcgguugggggugauu

SEQ ID NO: 476 - RNA, 21 nt, Artificial Sequence
  C3-targeting RNA guide sequence portion
auuuggagacucggagguuug

SEQ ID NO: 477 - RNA, 21 nt, Artificial Sequence
  C3-targeting RNA guide sequence portion
caaaccuccgagucuccaaau

SEQ ID NO: 478 - RNA, 21 nt, Artificial Sequence
  C3-targeting RNA guide sequence portion
caaaucacccccaaccgcacc

SEQ ID NO: 479 - RNA, 21 nt, Artificial Sequence
  C3-targeting RNA guide sequence portion
ccaaaucacccccaaccgcac

SEQ ID NO: 480 - RNA, 21 nt, Artificial Sequence
  C3-targeting RNA guide sequence portion
ccgagucuccaaaucaccccc

SEQ ID NO: 481 - RNA, 21 nt, Artificial Sequence
  C3-targeting RNA guide sequence portion
ccuccgagucuccaaaucacc

SEQ ID NO: 482 - RNA, 21 nt, Artificial Sequence
  C3-targeting RNA guide sequence portion
cgagucuccaaaucaccccca

SEQ ID NO: 483 - RNA, 21 nt, Artificial Sequence
  C3-targeting RNA guide sequence portion
cgguugggggugauuuggaga

SEQ ID NO: 484 - RNA, 21 nt, Artificial Sequence
  C3-targeting RNA guide sequence portion
cuccaaaucacccccaaccgc

SEQ ID NO: 485 - RNA, 21 nt, Artificial Sequence
  C3-targeting RNA guide sequence portion
cuccgagucuccaaaucaccc

SEQ ID NO: 486 - RNA, 21 nt, Artificial Sequence
  C3-targeting RNA guide sequence portion
gagucuccaaaucacccccaa

SEQ ID NO: 487 - RNA, 21 nt, Artificial Sequence
  C3-targeting RNA guide sequence portion
gauggugcgguugggggugau

SEQ ID NO: 488 - RNA, 21 nt, Artificial Sequence
  C3-targeting RNA guide sequence portion
gauuuggagacucggagguuu

SEQ ID NO: 489 - RNA, 21 nt, Artificial Sequence
  C3-targeting RNA guide sequence portion
gcgguugggggugauuuggag

SEQ ID NO: 490 - RNA, 21 nt, Artificial Sequence
  C3-targeting RNA guide sequence portion
gggggugauuuggagacucgg

SEQ ID NO: 491 - RNA, 21 nt, Artificial Sequence
  C3-targeting RNA guide sequence portion
ggggugauuuggagacucgga

SEQ ID NO: 492 - RNA, 21 nt, Artificial Sequence
  C3-targeting RNA guide sequence portion
gggugauuuggagacucggag

SEQ ID NO: 493 - RNA, 21 nt, Artificial Sequence
  C3-targeting RNA guide sequence portion
ggugauuuggagacucggagg

SEQ ID NO: 494 - RNA, 21 nt, Artificial Sequence
  C3-targeting RNA guide sequence portion
ggugcgguugggggugauuug

SEQ ID NO: 495 - RNA, 21 nt, Artificial Sequence
  C3-targeting RNA guide sequence portion
gguugggggugauuuggagac

SEQ ID NO: 496 - RNA, 21 nt, Artificial Sequence
  C3-targeting RNA guide sequence portion
gucuccaaaucacccccaacc

SEQ ID NO: 497 - RNA, 21 nt, Artificial Sequence
  C3-targeting RNA guide sequence portion
gugauuuggagacucggaggu

SEQ ID NO: 498 - RNA, 21 nt, Artificial Sequence
  C3-targeting RNA guide sequence portion
gugcgguugggggugauuugg

SEQ ID NO: 499 - RNA, 21 nt, Artificial Sequence
  C3-targeting RNA guide sequence portion
guugggggugauuuggagacu

SEQ ID NO: 500 - RNA, 21 nt, Artificial Sequence
  C3-targeting RNA guide sequence portion
uccaaaucacccccaaccgca

SEQ ID NO: 501 - RNA, 21 nt, Artificial Sequence
  C3-targeting RNA guide sequence portion
uccgagucuccaaaucacccc

SEQ ID NO: 502 - RNA, 21 nt, Artificial Sequence
  C3-targeting RNA guide sequence portion
ucuccaaaucacccccaaccg

SEQ ID NO: 503 - RNA, 21 nt, Artificial Sequence
  C3-targeting RNA guide sequence portion
ugauggugcgguuggggguga

SEQ ID NO: 504 - RNA, 21 nt, Artificial Sequence
  C3-targeting RNA guide sequence portion
ugauuuggagacucggagguu

SEQ ID NO: 505 - RNA, 21 nt, Artificial Sequence
  C3-targeting RNA guide sequence portion
ugcgguugggggugauuugga

SEQ ID NO: 506 - RNA, 21 nt, Artificial Sequence
  C3-targeting RNA guide sequence portion
ugggggugauuuggagacucg

SEQ ID NO: 507 - RNA, 21 nt, Artificial Sequence
  C3-targeting RNA guide sequence portion
uggugcgguugggggugauuu

SEQ ID NO: 508 - RNA, 21 nt, Artificial Sequence
  C3-targeting RNA guide sequence portion
uugggggugauuuggagacuc

SEQ ID NO: 509 - RNA, 22 nt, Artificial Sequence
  C3-targeting RNA guide sequence portion
aaaccuccgagucuccaaauca

SEQ ID NO: 510 - RNA, 22 nt, Artificial Sequence
  C3-targeting RNA guide sequence portion
aaaucacccccaaccgcaccau

SEQ ID NO: 511 - RNA, 22 nt, Artificial Sequence
  C3-targeting RNA guide sequence portion
aaccuccgagucuccaaaucac

SEQ ID NO: 512 - RNA, 22 nt, Artificial Sequence
  C3-targeting RNA guide sequence portion
aaucacccccaaccgcaccauc

SEQ ID NO: 513 - RNA, 22 nt, Artificial Sequence
  C3-targeting RNA guide sequence portion
accuccgagucuccaaaucacc

SEQ ID NO: 514 - RNA, 22 nt, Artificial Sequence
  C3-targeting RNA guide sequence portion
agucuccaaaucacccccaacc

SEQ ID NO: 515 - RNA, 22 nt, Artificial Sequence
  C3-targeting RNA guide sequence portion
auggugcgguugggggugauuu

SEQ ID NO: 516 - RNA, 22 nt, Artificial Sequence
  C3-targeting RNA guide sequence portion
auuuggagacucggagguuugg

SEQ ID NO: 517 - RNA, 22 nt, Artificial Sequence
  C3-targeting RNA guide sequence portion
caaaccuccgagucuccaaauc

SEQ ID NO: 518 - RNA, 22 nt, Artificial Sequence
  C3-targeting RNA guide sequence portion
caaaucacccccaaccgcacca

SEQ ID NO: 519 - RNA, 22 nt, Artificial Sequence
  C3-targeting RNA guide sequence portion
ccaaaccuccgagucuccaaau

SEQ ID NO: 520 - RNA, 22 nt, Artificial Sequence
  C3-targeting RNA guide sequence portion
ccaaaucacccccaaccgcacc

SEQ ID NO: 521 - RNA, 22 nt, Artificial Sequence
  C3-targeting RNA guide sequence portion
ccgagucuccaaaucaccccca

SEQ ID NO: 522 - RNA, 22 nt, Artificial Sequence
  C3-targeting RNA guide sequence portion
ccuccgagucuccaaaucaccc

SEQ ID NO: 523 - RNA, 22 nt, Artificial Sequence
  C3-targeting RNA guide sequence portion
cgagucuccaaaucacccccaa

SEQ ID NO: 524 - RNA, 22 nt, Artificial Sequence
  C3-targeting RNA guide sequence portion
cgguugggggugauuuggagac

SEQ ID NO: 525 - RNA, 22 nt, Artificial Sequence
  C3-targeting RNA guide sequence portion
cuccaaaucacccccaaccgca

SEQ ID NO: 526 - RNA, 22 nt, Artificial Sequence
  C3-targeting RNA guide sequence portion
cuccgagucuccaaaucacccc

SEQ ID NO: 527 - RNA, 22 nt, Artificial Sequence
  C3-targeting RNA guide sequence portion
gagucuccaaaucacccccaac

SEQ ID NO: 528 - RNA, 22 nt, Artificial Sequence
  C3-targeting RNA guide sequence portion
gauggugcgguugggggugauu

SEQ ID NO: 529 - RNA, 22 nt, Artificial Sequence
  C3-targeting RNA guide sequence portion
gauuuggagacucggagguuug

SEQ ID NO: 530 - RNA, 22 nt, Artificial Sequence
  C3-targeting RNA guide sequence portion
gcgguugggggugauuuggaga

SEQ ID NO: 531 - RNA, 22 nt, Artificial Sequence
  C3-targeting RNA guide sequence portion
gggggugauuuggagacucgga

SEQ ID NO: 532 - RNA, 22 nt, Artificial Sequence
  C3-targeting RNA guide sequence portion
ggggugauuuggagacucggag

SEQ ID NO: 533 - RNA, 22 nt, Artificial Sequence
  C3-targeting RNA guide sequence portion
gggugauuuggagacucggagg

SEQ ID NO: 534 - RNA, 22 nt, Artificial Sequence
  C3-targeting RNA guide sequence portion
ggugauuuggagacucggaggu

SEQ ID NO: 535 - RNA, 22 nt, Artificial Sequence
  C3-targeting RNA guide sequence portion
ggugcgguugggggugauuugg

SEQ ID NO: 536 - RNA, 22 nt, Artificial Sequence
  C3-targeting RNA guide sequence portion
gguugggggugauuuggagacu

SEQ ID NO: 537 - RNA, 22 nt, Artificial Sequence
  C3-targeting RNA guide sequence portion
gucuccaaaucacccccaaccg

SEQ ID NO: 538 - RNA, 22 nt, Artificial Sequence
  C3-targeting RNA guide sequence portion
gugauuuggagacucggagguu

SEQ ID NO: 539 - RNA, 22 nt, Artificial Sequence
  C3-targeting RNA guide sequence portion
gugcgguugggggugauuugga

SEQ ID NO: 540 - RNA, 22 nt, Artificial Sequence
  C3-targeting RNA guide sequence portion
guugggggugauuuggagacuc

SEQ ID NO: 541 - RNA, 22 nt, Artificial Sequence
  C3-targeting RNA guide sequence portion
uccaaaucacccccaaccgcac

SEQ ID NO: 542 - RNA, 22 nt, Artificial Sequence
  C3-targeting RNA guide sequence portion
uccgagucuccaaaucaccccc

SEQ ID NO: 543 - RNA, 22 nt, Artificial Sequence
  C3-targeting RNA guide sequence portion
ucuccaaaucacccccaaccgc

SEQ ID NO: 544 - RNA, 22 nt, Artificial Sequence
  C3-targeting RNA guide sequence portion
ugauggugcgguugggggugau

SEQ ID NO: 545 - RNA, 22 nt, Artificial Sequence
  C3-targeting RNA guide sequence portion
ugauuuggagacucggagguuu

SEQ ID NO: 546 - RNA, 22 nt, Artificial Sequence
  C3-targeting RNA guide sequence portion
ugcgguugggggugauuuggag

SEQ ID NO: 547 - RNA, 22 nt, Artificial Sequence
  C3-targeting RNA guide sequence portion
ugggggugauuuggagacucgg

SEQ ID NO: 548 - RNA, 22 nt, Artificial Sequence
  C3-targeting RNA guide sequence portion
uggugcgguugggggugauuug

SEQ ID NO: 549 - RNA, 22 nt, Artificial Sequence
  C3-targeting RNA guide sequence portion
uugauggugcgguuggggguga

SEQ ID NO: 550 - RNA, 22 nt, Artificial Sequence
  C3-targeting RNA guide sequence portion
uugggggugauuuggagacucg

SEQ ID NO: 551 - RNA, 20 nt, Artificial Sequence
  C3-targeting RNA guide sequence portion
acacccccaaccgcaccauc

SEQ ID NO: 552 - RNA, 20 nt, Artificial Sequence
  C3-targeting RNA guide sequence portion
cacccccaaccgcaccauca

SEQ ID NO: 553 - RNA, 20 nt, Artificial Sequence
  C3-targeting RNA guide sequence portion
guucauugauggugcgguug

SEQ ID NO: 554 - RNA, 20 nt, Artificial Sequence
  C3-targeting RNA guide sequence portion
uguucauugauggugcgguu

SEQ ID NO: 555 - RNA, 21 nt, Artificial Sequence
  C3-targeting RNA guide sequence portion
acacccccaaccgcaccauca

SEQ ID NO: 556 - RNA, 21 nt, Artificial Sequence
  C3-targeting RNA guide sequence portion
cacccccaaccgcaccaucaa

SEQ ID NO: 557 - RNA, 21 nt, Artificial Sequence
  C3-targeting RNA guide sequence portion
guguucauugauggugcgguu

SEQ ID NO: 558 - RNA, 21 nt, Artificial Sequence
  C3-targeting RNA guide sequence portion
uguucauugauggugcgguug

SEQ ID NO: 559 - RNA, 22 nt, Artificial Sequence
  C3-targeting RNA guide sequence portion
acacccccaaccgcaccaucaa

SEQ ID NO: 560 - RNA, 22 nt, Artificial Sequence
  C3-targeting RNA guide sequence portion
cacccccaaccgcaccaucaau

SEQ ID NO: 561 - RNA, 22 nt, Artificial Sequence
  C3-targeting RNA guide sequence portion
gguguucauugauggugcgguu

SEQ ID NO: 562 - RNA, 22 nt, Artificial Sequence
  C3-targeting RNA guide sequence portion
guguucauugauggugcgguug

SEQ ID NO: 563 - RNA, 20 nt, Artificial Sequence
  C3-targeting RNA guide sequence portion
aaacaccccaaccgcaccau

SEQ ID NO: 564 - RNA, 20 nt, Artificial Sequence
  C3-targeting RNA guide sequence portion
aacaccccaaccgcaccauc

SEQ ID NO: 565 - RNA, 20 nt, Artificial Sequence
  C3-targeting RNA guide sequence portion
acaccccaaccgcaccauca

SEQ ID NO: 566 - RNA, 20 nt, Artificial Sequence
  C3-targeting RNA guide sequence portion
agucuccaaacaccccaacc

SEQ ID NO: 567 - RNA, 20 nt, Artificial Sequence
  C3-targeting RNA guide sequence portion
auggugcgguugggguguuu

SEQ ID NO: 568 - RNA, 20 nt, Artificial Sequence
  C3-targeting RNA guide sequence portion
auugauggugcgguuggggu

SEQ ID NO: 569 - RNA, 20 nt, Artificial Sequence
  C3-targeting RNA guide sequence portion
caaacaccccaaccgcacca

SEQ ID NO: 570 - RNA, 20 nt, Artificial Sequence
  C3-targeting RNA guide sequence portion
caccccaaccgcaccaucaa

SEQ ID NO: 571 - RNA, 20 nt, Artificial Sequence
  C3-targeting RNA guide sequence portion
ccaaacaccccaaccgcacc

SEQ ID NO: 572 - RNA, 20 nt, Artificial Sequence
  C3-targeting RNA guide sequence portion
ccgagucuccaaacacccca

SEQ ID NO: 573 - RNA, 20 nt, Artificial Sequence
  C3-targeting RNA guide sequence portion
cgagucuccaaacaccccaa

SEQ ID NO: 574 - RNA, 20 nt, Artificial Sequence
  C3-targeting RNA guide sequence portion
cgguugggguguuuggagac

SEQ ID NO: 575 - RNA, 20 nt, Artificial Sequence
  C3-targeting RNA guide sequence portion
cuccaaacaccccaaccgca

SEQ ID NO: 576 - RNA, 20 nt, Artificial Sequence
  C3-targeting RNA guide sequence portion
gagucuccaaacaccccaac

SEQ ID NO: 577 - RNA, 20 nt, Artificial Sequence
  C3-targeting RNA guide sequence portion
gauggugcgguugggguguu

SEQ ID NO: 578 - RNA, 20 nt, Artificial Sequence
  C3-targeting RNA guide sequence portion
gcgguugggguguuuggaga

SEQ ID NO: 579 - RNA, 20 nt, Artificial Sequence
  C3-targeting RNA guide sequence portion
ggugcgguugggguguuugg

SEQ ID NO: 580 - RNA, 20 nt, Artificial Sequence
  C3-targeting RNA guide sequence portion
gguugggguguuuggagacu

SEQ ID NO: 581 - RNA, 20 nt, Artificial Sequence
  C3-targeting RNA guide sequence portion
gucuccaaacaccccaaccg

SEQ ID NO: 582 - RNA, 20 nt, Artificial Sequence
  C3-targeting RNA guide sequence portion
gugcgguugggguguuugga

SEQ ID NO: 583 - RNA, 20 nt, Artificial Sequence
  C3-targeting RNA guide sequence portion
guguucauugauggugcggu

SEQ ID NO: 584 - RNA, 20 nt, Artificial Sequence
  C3-targeting RNA guide sequence portion
guugggguguuuggagacuc

SEQ ID NO: 585 - RNA, 20 nt, Artificial Sequence
  C3-targeting RNA guide sequence portion
uccaaacaccccaaccgcac

SEQ ID NO: 586 - RNA, 20 nt, Artificial Sequence
  C3-targeting RNA guide sequence portion
ucuccaaacaccccaaccgc

SEQ ID NO: 587 - RNA, 20 nt, Artificial Sequence
  C3-targeting RNA guide sequence portion
ugauggugcgguuggggugu

SEQ ID NO: 588 - RNA, 20 nt, Artificial Sequence
  C3-targeting RNA guide sequence portion
ugcgguugggguguuuggag

SEQ ID NO: 589 - RNA, 20 nt, Artificial Sequence
  C3-targeting RNA guide sequence portion
ugggguguuuggagacucgg

SEQ ID NO: 590 - RNA, 20 nt, Artificial Sequence
  C3-targeting RNA guide sequence portion
uggugcgguugggguguuug

SEQ ID NO: 591 - RNA, 20 nt, Artificial Sequence
  C3-targeting RNA guide sequence portion
uugauggugcgguuggggug

SEQ ID NO: 592 - RNA, 20 nt, Artificial Sequence
  C3-targeting RNA guide sequence portion
uugggguguuuggagacucg

SEQ ID NO: 593 - RNA, 21 nt, Artificial Sequence
  C3-targeting RNA guide sequence portion
aaacaccccaaccgcaccauc

SEQ ID NO: 594 - RNA, 21 nt, Artificial Sequence
  C3-targeting RNA guide sequence portion
aacaccccaaccgcaccauca

SEQ ID NO: 595 - RNA, 21 nt, Artificial Sequence
  C3-targeting RNA guide sequence portion
acaccccaaccgcaccaucaa

SEQ ID NO: 596 - RNA, 21 nt, Artificial Sequence
  C3-targeting RNA guide sequence portion
agucuccaaacaccccaaccg

SEQ ID NO: 597 - RNA, 21 nt, Artificial Sequence
  C3-targeting RNA guide sequence portion
auggugcgguugggguguuug

SEQ ID NO: 598 - RNA, 21 nt, Artificial Sequence
  C3-targeting RNA guide sequence portion
auugauggugcgguuggggug

SEQ ID NO: 599 - RNA, 21 nt, Artificial Sequence
  C3-targeting RNA guide sequence portion
caaacaccccaaccgcaccau

SEQ ID NO: 600 - RNA, 21 nt, Artificial Sequence
  C3-targeting RNA guide sequence portion
caccccaaccgcaccaucaau

SEQ ID NO: 601 - RNA, 21 nt, Artificial Sequence
  C3-targeting RNA guide sequence portion
cauugauggugcgguuggggu

SEQ ID NO: 602 - RNA, 21 nt, Artificial Sequence
  C3-targeting RNA guide sequence portion
ccaaacaccccaaccgcacca

SEQ ID NO: 603 - RNA, 21 nt, Artificial Sequence
  C3-targeting RNA guide sequence portion
ccgagucuccaaacaccccaa

SEQ ID NO: 604 - RNA, 21 nt, Artificial Sequence
  C3-targeting RNA guide sequence portion
cgagucuccaaacaccccaac

SEQ ID NO: 605 - RNA, 21 nt, Artificial Sequence
  C3-targeting RNA guide sequence portion
cgguugggguguuuggagacu

SEQ ID NO: 606 - RNA, 21 nt, Artificial Sequence
  C3-targeting RNA guide sequence portion
cuccaaacaccccaaccgcac

SEQ ID NO: 607 - RNA, 21 nt, Artificial Sequence
  C3-targeting RNA guide sequence portion
gagucuccaaacaccccaacc

SEQ ID NO: 608 - RNA, 21 nt, Artificial Sequence
  C3-targeting RNA guide sequence portion
gauggugcgguugggguguuu

SEQ ID NO: 609 - RNA, 21 nt, Artificial Sequence
  C3-targeting RNA guide sequence portion
gcgguugggguguuuggagac

SEQ ID NO: 610 - RNA, 21 nt, Artificial Sequence
  C3-targeting RNA guide sequence portion
ggugcgguugggguguuugga

SEQ ID NO: 611 - RNA, 21 nt, Artificial Sequence
  C3-targeting RNA guide sequence portion
gguguucauugauggugcggu

SEQ ID NO: 612 - RNA, 21 nt, Artificial Sequence
  C3-targeting RNA guide sequence portion
gguugggguguuuggagacuc

SEQ ID NO: 613 - RNA, 21 nt, Artificial Sequence
  C3-targeting RNA guide sequence portion
gucuccaaacaccccaaccgc

SEQ ID NO: 614 - RNA, 21 nt, Artificial Sequence
  C3-targeting RNA guide sequence portion
gugcgguugggguguuuggag

SEQ ID NO: 615 - RNA, 21 nt, Artificial Sequence
  C3-targeting RNA guide sequence portion
guugggguguuuggagacucg

SEQ ID NO: 616 - RNA, 21 nt, Artificial Sequence
  C3-targeting RNA guide sequence portion
uccaaacaccccaaccgcacc

SEQ ID NO: 617 - RNA, 21 nt, Artificial Sequence
  C3-targeting RNA guide sequence portion
uccgagucuccaaacacccca

SEQ ID NO: 618 - RNA, 21 nt, Artificial Sequence
  C3-targeting RNA guide sequence portion
ucuccaaacaccccaaccgca

SEQ ID NO: 619 - RNA, 21 nt, Artificial Sequence
  C3-targeting RNA guide sequence portion
ugauggugcgguugggguguu

SEQ ID NO: 620 - RNA, 21 nt, Artificial Sequence
  C3-targeting RNA guide sequence portion
ugcgguugggguguuuggaga

SEQ ID NO: 621 - RNA, 21 nt, Artificial Sequence
  C3-targeting RNA guide sequence portion
ugggguguuuggagacucgga

SEQ ID NO: 622 - RNA, 21 nt, Artificial Sequence
  C3-targeting RNA guide sequence portion
uggugcgguugggguguuugg

SEQ ID NO: 623 - RNA, 21 nt, Artificial Sequence
  C3-targeting RNA guide sequence portion
uugauggugcgguuggggugu

SEQ ID NO: 624 - RNA, 21 nt, Artificial Sequence
  C3-targeting RNA guide sequence portion
uugggguguuuggagacucgg

SEQ ID NO: 625 - RNA, 22 nt, Artificial Sequence
  C3-targeting RNA guide sequence portion
aaacaccccaaccgcaccauca

SEQ ID NO: 626 - RNA, 22 nt, Artificial Sequence
  C3-targeting RNA guide sequence portion
aacaccccaaccgcaccaucaa

SEQ ID NO: 627 - RNA, 22 nt, Artificial Sequence
  C3-targeting RNA guide sequence portion
acaccccaaccgcaccaucaau

SEQ ID NO: 628 - RNA, 22 nt, Artificial Sequence
  C3-targeting RNA guide sequence portion
agucuccaaacaccccaaccgc

SEQ ID NO: 629 - RNA, 22 nt, Artificial Sequence
  C3-targeting RNA guide sequence portion
auggugcgguugggguguuugg

SEQ ID NO: 630 - RNA, 22 nt, Artificial Sequence
  C3-targeting RNA guide sequence portion
auugauggugcgguuggggugu

SEQ ID NO: 631 - RNA, 22 nt, Artificial Sequence
  C3-targeting RNA guide sequence portion
caaacaccccaaccgcaccauc

SEQ ID NO: 632 - RNA, 22 nt, Artificial Sequence
  C3-targeting RNA guide sequence portion
caccccaaccgcaccaucaaug

SEQ ID NO: 633 - RNA, 22 nt, Artificial Sequence
  C3-targeting RNA guide sequence portion
cauugauggugcgguuggggug

SEQ ID NO: 634 - RNA, 22 nt, Artificial Sequence
  C3-targeting RNA guide sequence portion
ccaaacaccccaaccgcaccau

SEQ ID NO: 635 - RNA, 22 nt, Artificial Sequence
  C3-targeting RNA guide sequence portion
ccgagucuccaaacaccccaac

SEQ ID NO: 636 - RNA, 22 nt, Artificial Sequence
  C3-targeting RNA guide sequence portion
cgagucuccaaacaccccaacc

SEQ ID NO: 637 - RNA, 22 nt, Artificial Sequence
  C3-targeting RNA guide sequence portion
cgguugggguguuuggagacuc

SEQ ID NO: 638 - RNA, 22 nt, Artificial Sequence
  C3-targeting RNA guide sequence portion
cuccaaacaccccaaccgcacc

SEQ ID NO: 639 - RNA, 22 nt, Artificial Sequence
  C3-targeting RNA guide sequence portion
cuccgagucuccaaacacccca

SEQ ID NO: 640 - RNA, 22 nt, Artificial Sequence
  C3-targeting RNA guide sequence portion
gagucuccaaacaccccaaccg

SEQ ID NO: 641 - RNA, 22 nt, Artificial Sequence
  C3-targeting RNA guide sequence portion
gauggugcgguugggguguuug

SEQ ID NO: 642 - RNA, 22 nt, Artificial Sequence
  C3-targeting RNA guide sequence portion
gcgguugggguguuuggagacu

SEQ ID NO: 643 - RNA, 22 nt, Artificial Sequence
  C3-targeting RNA guide sequence portion
ggugcgguugggguguuuggag

SEQ ID NO: 644 - RNA, 22 nt, Artificial Sequence
  C3-targeting RNA guide sequence portion
gguugggguguuuggagacucg

SEQ ID NO: 645 - RNA, 22 nt, Artificial Sequence
  C3-targeting RNA guide sequence portion
gucuccaaacaccccaaccgca

SEQ ID NO: 646 - RNA, 22 nt, Artificial Sequence
  C3-targeting RNA guide sequence portion
gugcgguugggguguuuggaga

SEQ ID NO: 647 - RNA, 22 nt, Artificial Sequence
  C3-targeting RNA guide sequence portion
guugggguguuuggagacucgg

SEQ ID NO: 648 - RNA, 22 nt, Artificial Sequence
  C3-targeting RNA guide sequence portion
ucauugauggugcgguuggggu

SEQ ID NO: 649 - RNA, 22 nt, Artificial Sequence
  C3-targeting RNA guide sequence portion
uccaaacaccccaaccgcacca

SEQ ID NO: 650 - RNA, 22 nt, Artificial Sequence
  C3-targeting RNA guide sequence portion
uccgagucuccaaacaccccaa

SEQ ID NO: 651 - RNA, 22 nt, Artificial Sequence
  C3-targeting RNA guide sequence portion
ucuccaaacaccccaaccgcac

SEQ ID NO: 652 - RNA, 22 nt, Artificial Sequence
  C3-targeting RNA guide sequence portion
ugauggugcgguugggguguuu

SEQ ID NO: 653 - RNA, 22 nt, Artificial Sequence
  C3-targeting RNA guide sequence portion
ugcgguugggguguuuggagac

SEQ ID NO: 654 - RNA, 22 nt, Artificial Sequence
  C3-targeting RNA guide sequence portion
ugggguguuuggagacucggag

SEQ ID NO: 655 - RNA, 22 nt, Artificial Sequence
  C3-targeting RNA guide sequence portion
uggugcgguugggguguuugga

SEQ ID NO: 656 - RNA, 22 nt, Artificial Sequence
  C3-targeting RNA guide sequence portion
ugguguucauugauggugcggu

SEQ ID NO: 657 - RNA, 22 nt, Artificial Sequence
  C3-targeting RNA guide sequence portion
uugauggugcgguugggguguu

SEQ ID NO: 658 - RNA, 22 nt, Artificial Sequence
  C3-targeting RNA guide sequence portion
uugggguguuuggagacucgga

SEQ ID NO: 659 - RNA, 20 nt, Artificial Sequence
  C3-targeting RNA guide sequence portion
aaagaacuccagacacguga

SEQ ID NO: 660 - RNA, 20 nt, Artificial Sequence
  C3-targeting RNA guide sequence portion
aaagcuucaguuauaucuca

SEQ ID NO: 661 - RNA, 20 nt, Artificial Sequence
  C3-targeting RNA guide sequence portion
aaauccccagccgccucacc

SEQ ID NO: 662 - RNA, 20 nt, Artificial Sequence
  C3-targeting RNA guide sequence portion
aacaggugagguuucaagua

SEQ ID NO: 663 - RNA, 20 nt, Artificial Sequence
  C3-targeting RNA guide sequence portion
aacuccagacacgugagaua

SEQ ID NO: 664 - RNA, 20 nt, Artificial Sequence
  C3-targeting RNA guide sequence portion
aacugaagcuuuaucuggag

SEQ ID NO: 665 - RNA, 20 nt, Artificial Sequence
  C3-targeting RNA guide sequence portion
aagaacuccagacacgugag

SEQ ID NO: 666 - RNA, 20 nt, Artificial Sequence
  C3-targeting RNA guide sequence portion
aagagggagaggcugaaauc

SEQ ID NO: 667 - RNA, 20 nt, Artificial Sequence
  C3-targeting RNA guide sequence portion
aagcuucaguuauaucucac

SEQ ID NO: 668 - RNA, 20 nt, Artificial Sequence
  C3-targeting RNA guide sequence portion
aagcuuuaucuggagugggg

SEQ ID NO: 669 - RNA, 20 nt, Artificial Sequence
  C3-targeting RNA guide sequence portion
aaguaggauggagcugagcu

SEQ ID NO: 670 - RNA, 20 nt, Artificial Sequence
  C3-targeting RNA guide sequence portion
aauccccagccgccucaccu

SEQ ID NO: 671 - RNA, 20 nt, Artificial Sequence
  C3-targeting RNA guide sequence portion
acacccccauucccccacuc

SEQ ID NO: 672 - RNA, 20 nt, Artificial Sequence
  C3-targeting RNA guide sequence portion
acacgugagauauaacugaa

SEQ ID NO: 673 - RNA, 20 nt, Artificial Sequence
  C3-targeting RNA guide sequence portion
acaggugagguuucaaguag

SEQ ID NO: 674 - RNA, 20 nt, Artificial Sequence
  C3-targeting RNA guide sequence portion
acccccauucccccacucca

SEQ ID NO: 675 - RNA, 20 nt, Artificial Sequence
  C3-targeting RNA guide sequence portion
accugcagcucagcuccauc

SEQ ID NO: 676 - RNA, 20 nt, Artificial Sequence
  C3-targeting RNA guide sequence portion
acgugagauauaacugaagc

SEQ ID NO: 677 - RNA, 20 nt, Artificial Sequence
  C3-targeting RNA guide sequence portion
acgugucuggaguucuuugc

SEQ ID NO: 678 - RNA, 20 nt, Artificial Sequence
  C3-targeting RNA guide sequence portion
acuccagacacgugagauau

SEQ ID NO: 679 - RNA, 20 nt, Artificial Sequence
  C3-targeting RNA guide sequence portion
acuccagauaaagcuucagu

SEQ ID NO: 680 - RNA, 20 nt, Artificial Sequence
  C3-targeting RNA guide sequence portion
acugaagcuuuaucuggagu

SEQ ID NO: 681 - RNA, 20 nt, Artificial Sequence
  C3-targeting RNA guide sequence portion
acuugaaaccucaccuguuc

SEQ ID NO: 682 - RNA, 20 nt, Artificial Sequence
  C3-targeting RNA guide sequence portion
agaacuccagacacgugaga

SEQ ID NO: 683 - RNA, 20 nt, Artificial Sequence
  C3-targeting RNA guide sequence portion
agacacgugagauauaacug

SEQ ID NO: 684 - RNA, 20 nt, Artificial Sequence
  C3-targeting RNA guide sequence portion
agaggcugaaauccccagcc

SEQ ID NO: 685 - RNA, 20 nt, Artificial Sequence
  C3-targeting RNA guide sequence portion
agagggagaggcugaaaucc

SEQ ID NO: 686 - RNA, 20 nt, Artificial Sequence
  C3-targeting RNA guide sequence portion
agauaaagcuucaguuauau

SEQ ID NO: 687 - RNA, 20 nt, Artificial Sequence
  C3-targeting RNA guide sequence portion
agauauaacugaagcuuuau

SEQ ID NO: 688 - RNA, 20 nt, Artificial Sequence
  C3-targeting RNA guide sequence portion
agccgccucaccugcagcuc

SEQ ID NO: 689 - RNA, 20 nt, Artificial Sequence
  C3-targeting RNA guide sequence portion
agccucucccucuuggcaaa

SEQ ID NO: 690 - RNA, 20 nt, Artificial Sequence
  C3-targeting RNA guide sequence portion
agcucagcuccauccuacuu

SEQ ID NO: 691 - RNA, 20 nt, Artificial Sequence
  C3-targeting RNA guide sequence portion
agcuccauccuacuugaaac

SEQ ID NO: 692 - RNA, 20 nt, Artificial Sequence
  C3-targeting RNA guide sequence portion
agcugagcugcaggugaggc

SEQ ID NO: 693 - RNA, 20 nt, Artificial Sequence
  C3-targeting RNA guide sequence portion
agcugcaggugaggcggcug

SEQ ID NO: 694 - RNA, 20 nt, Artificial Sequence
  C3-targeting RNA guide sequence portion
agcuucaguuauaucucacg

SEQ ID NO: 695 - RNA, 20 nt, Artificial Sequence
  C3-targeting RNA guide sequence portion
agcuuuaucuggaguggggg

SEQ ID NO: 696 - RNA, 20 nt, Artificial Sequence
  C3-targeting RNA guide sequence portion
aggauggagcugagcugcag

SEQ ID NO: 697 - RNA, 20 nt, Artificial Sequence
  C3-targeting RNA guide sequence portion
aggcggcuggggauuucagc

SEQ ID NO: 698 - RNA, 20 nt, Artificial Sequence
  C3-targeting RNA guide sequence portion
aggcugaaauccccagccgc

SEQ ID NO: 699 - RNA, 20 nt, Artificial Sequence
  C3-targeting RNA guide sequence portion
agggagaggcugaaaucccc

SEQ ID NO: 700 - RNA, 20 nt, Artificial Sequence
  C3-targeting RNA guide sequence portion
aggugaggcggcuggggauu

SEQ ID NO: 701 - RNA, 20 nt, Artificial Sequence
  C3-targeting RNA guide sequence portion
aggugagguuucaaguagga

SEQ ID NO: 702 - RNA, 20 nt, Artificial Sequence
  C3-targeting RNA guide sequence portion
agguuucaaguaggauggag

SEQ ID NO: 703 - RNA, 20 nt, Artificial Sequence
  C3-targeting RNA guide sequence portion
aguaggauggagcugagcug

SEQ ID NO: 704 - RNA, 20 nt, Artificial Sequence
  C3-targeting RNA guide sequence portion
aguuauaucucacgugucug

SEQ ID NO: 705 - RNA, 20 nt, Artificial Sequence
  C3-targeting RNA guide sequence portion
aguucuuugccaagagggag

SEQ ID NO: 706 - RNA, 20 nt, Artificial Sequence
  C3-targeting RNA guide sequence portion
auaaagcuucaguuauaucu

SEQ ID NO: 707 - RNA, 20 nt, Artificial Sequence
  C3-targeting RNA guide sequence portion
auaacugaagcuuuaucugg

SEQ ID NO: 708 - RNA, 20 nt, Artificial Sequence
  C3-targeting RNA guide sequence portion
auauaacugaagcuuuaucu

SEQ ID NO: 709 - RNA, 20 nt, Artificial Sequence
  C3-targeting RNA guide sequence portion
auaucucacgugucuggagu

SEQ ID NO: 710 - RNA, 20 nt, Artificial Sequence
  C3-targeting RNA guide sequence portion
auccccagccgccucaccug

SEQ ID NO: 711 - RNA, 20 nt, Artificial Sequence
  C3-targeting RNA guide sequence portion
auccuacuugaaaccucacc

SEQ ID NO: 712 - RNA, 20 nt, Artificial Sequence
  C3-targeting RNA guide sequence portion
aucucacgugucuggaguuc

SEQ ID NO: 713 - RNA, 20 nt, Artificial Sequence
  C3-targeting RNA guide sequence portion
aucuggagugggggaauggg

SEQ ID NO: 714 - RNA, 20 nt, Artificial Sequence
  C3-targeting RNA guide sequence portion
augcggugggaacaggugag

SEQ ID NO: 715 - RNA, 20 nt, Artificial Sequence
  C3-targeting RNA guide sequence portion
auggagcugagcugcaggug

SEQ ID NO: 716 - RNA, 20 nt, Artificial Sequence
  C3-targeting RNA guide sequence portion
auucccccacuccagauaaa

SEQ ID NO: 717 - RNA, 20 nt, Artificial Sequence
  C3-targeting RNA guide sequence portion
auuucagccucucccucuug

SEQ ID NO: 718 - RNA, 20 nt, Artificial Sequence
  C3-targeting RNA guide sequence portion
caaagaacuccagacacgug

SEQ ID NO: 719 - RNA, 20 nt, Artificial Sequence
  C3-targeting RNA guide sequence portion
caagagggagaggcugaaau

SEQ ID NO: 720 - RNA, 20 nt, Artificial Sequence
  C3-targeting RNA guide sequence portion
caaguaggauggagcugagc

SEQ ID NO: 721 - RNA, 20 nt, Artificial Sequence
  C3-targeting RNA guide sequence portion
cacacccccauucccccacu

SEQ ID NO: 722 - RNA, 20 nt, Artificial Sequence
  C3-targeting RNA guide sequence portion
cacccccauucccccacucc

SEQ ID NO: 723 - RNA, 20 nt, Artificial Sequence
  C3-targeting RNA guide sequence portion
caccugcagcucagcuccau

SEQ ID NO: 724 - RNA, 20 nt, Artificial Sequence
  C3-targeting RNA guide sequence portion
cacgugagauauaacugaag

SEQ ID NO: 725 - RNA, 20 nt, Artificial Sequence
  C3-targeting RNA guide sequence portion
cacgugucuggaguucuuug

SEQ ID NO: 726 - RNA, 20 nt, Artificial Sequence
  C3-targeting RNA guide sequence portion
cacuccagauaaagcuucag

SEQ ID NO: 727 - RNA, 20 nt, Artificial Sequence
  C3-targeting RNA guide sequence portion
cagacacgugagauauaacu

SEQ ID NO: 728 - RNA, 20 nt, Artificial Sequence
  C3-targeting RNA guide sequence portion
cagauaaagcuucaguuaua

SEQ ID NO: 729 - RNA, 20 nt, Artificial Sequence
  C3-targeting RNA guide sequence portion
cagccgccucaccugcagcu

SEQ ID NO: 730 - RNA, 20 nt, Artificial Sequence
  C3-targeting RNA guide sequence portion
cagccucucccucuuggcaa

SEQ ID NO: 731 - RNA, 20 nt, Artificial Sequence
  C3-targeting RNA guide sequence portion
cagcucagcuccauccuacu

SEQ ID NO: 732 - RNA, 20 nt, Artificial Sequence
  C3-targeting RNA guide sequence portion
cagcuccauccuacuugaaa

SEQ ID NO: 733 - RNA, 20 nt, Artificial Sequence
  C3-targeting RNA guide sequence portion
caggugaggcggcuggggau

SEQ ID NO: 734 - RNA, 20 nt, Artificial Sequence
  C3-targeting RNA guide sequence portion
caggugagguuucaaguagg

SEQ ID NO: 735 - RNA, 20 nt, Artificial Sequence
  C3-targeting RNA guide sequence portion
caguuauaucucacgugucu

SEQ ID NO: 736 - RNA, 20 nt, Artificial Sequence
  C3-targeting RNA guide sequence portion
cauccuacuugaaaccucac

SEQ ID NO: 737 - RNA, 20 nt, Artificial Sequence
  C3-targeting RNA guide sequence portion
cauucccccacuccagauaa

SEQ ID NO: 738 - RNA, 20 nt, Artificial Sequence
  C3-targeting RNA guide sequence portion
ccaagagggagaggcugaaa

SEQ ID NO: 739 - RNA, 20 nt, Artificial Sequence
  C3-targeting RNA guide sequence portion
ccacacccccauucccccac

SEQ ID NO: 740 - RNA, 20 nt, Artificial Sequence
  C3-targeting RNA guide sequence portion
ccacuccagauaaagcuuca

SEQ ID NO: 741 - RNA, 20 nt, Artificial Sequence
  C3-targeting RNA guide sequence portion
ccagacacgugagauauaac

SEQ ID NO: 742 - RNA, 20 nt, Artificial Sequence
  C3-targeting RNA guide sequence portion
ccagauaaagcuucaguuau

SEQ ID NO: 743 - RNA, 20 nt, Artificial Sequence
  C3-targeting RNA guide sequence portion
ccagccgccucaccugcagc

SEQ ID NO: 744 - RNA, 20 nt, Artificial Sequence
  C3-targeting RNA guide sequence portion
ccauccuacuugaaaccuca

SEQ ID NO: 745 - RNA, 20 nt, Artificial Sequence
  C3-targeting RNA guide sequence portion
ccauucccccacuccagaua

SEQ ID NO: 746 - RNA, 20 nt, Artificial Sequence
  C3-targeting RNA guide sequence portion
cccacuccagauaaagcuuc

SEQ ID NO: 747 - RNA, 20 nt, Artificial Sequence
  C3-targeting RNA guide sequence portion
cccagccgccucaccugcag

SEQ ID NO: 748 - RNA, 20 nt, Artificial Sequence
  C3-targeting RNA guide sequence portion
cccauucccccacuccagau

SEQ ID NO: 749 - RNA, 20 nt, Artificial Sequence
  C3-targeting RNA guide sequence portion
ccccacuccagauaaagcuu

SEQ ID NO: 750 - RNA, 20 nt, Artificial Sequence
  C3-targeting RNA guide sequence portion
ccccagccgccucaccugca

SEQ ID NO: 751 - RNA, 20 nt, Artificial Sequence
  C3-targeting RNA guide sequence portion
ccccauucccccacuccaga

SEQ ID NO: 752 - RNA, 20 nt, Artificial Sequence
  C3-targeting RNA guide sequence portion
cccccacuccagauaaagcu

SEQ ID NO: 753 - RNA, 20 nt, Artificial Sequence
  C3-targeting RNA guide sequence portion
cccccauucccccacuccag

SEQ ID NO: 754 - RNA, 20 nt, Artificial Sequence
  C3-targeting RNA guide sequence portion
cccucuuggcaaagaacucc

SEQ ID NO: 755 - RNA, 20 nt, Artificial Sequence
  C3-targeting RNA guide sequence portion
ccgccucaccugcagcucag

SEQ ID NO: 756 - RNA, 20 nt, Artificial Sequence
  C3-targeting RNA guide sequence portion
ccuacuugaaaccucaccug

SEQ ID NO: 757 - RNA, 20 nt, Artificial Sequence
  C3-targeting RNA guide sequence portion
ccucaccugcagcucagcuc

SEQ ID NO: 758 - RNA, 20 nt, Artificial Sequence
  C3-targeting RNA guide sequence portion
ccucucccucuuggcaaaga

SEQ ID NO: 759 - RNA, 20 nt, Artificial Sequence
  C3-targeting RNA guide sequence portion
ccucuuggcaaagaacucca

SEQ ID NO: 760 - RNA, 20 nt, Artificial Sequence
  C3-targeting RNA guide sequence portion
ccugcagcucagcuccaucc

SEQ ID NO: 761 - RNA, 20 nt, Artificial Sequence
  C3-targeting RNA guide sequence portion
cgccucaccugcagcucagc

SEQ ID NO: 762 - RNA, 20 nt, Artificial Sequence
  C3-targeting RNA guide sequence portion
cggcuggggauuucagccuc

SEQ ID NO: 763 - RNA, 20 nt, Artificial Sequence
  C3-targeting RNA guide sequence portion
cggugggaacaggugagguu

SEQ ID NO: 764 - RNA, 20 nt, Artificial Sequence
  C3-targeting RNA guide sequence portion
cgugagauauaacugaagcu

SEQ ID NO: 765 - RNA, 20 nt, Artificial Sequence
  C3-targeting RNA guide sequence portion
cgugucuggaguucuuugcc

SEQ ID NO: 766 - RNA, 20 nt, Artificial Sequence
  C3-targeting RNA guide sequence portion
cuacuugaaaccucaccugu

SEQ ID NO: 767 - RNA, 20 nt, Artificial Sequence
  C3-targeting RNA guide sequence portion
cucaccugcagcucagcucc

SEQ ID NO: 768 - RNA, 20 nt, Artificial Sequence
  C3-targeting RNA guide sequence portion
cucacgugucuggaguucuu

SEQ ID NO: 769 - RNA, 20 nt, Artificial Sequence
  C3-targeting RNA guide sequence portion
cucagcuccauccuacuuga

SEQ ID NO: 770 - RNA, 20 nt, Artificial Sequence
  C3-targeting RNA guide sequence portion
cuccagacacgugagauaua

SEQ ID NO: 771 - RNA, 20 nt, Artificial Sequence
  C3-targeting RNA guide sequence portion
cuccagauaaagcuucaguu

SEQ ID NO: 772 - RNA, 20 nt, Artificial Sequence
  C3-targeting RNA guide sequence portion
cuccauccuacuugaaaccu

SEQ ID NO: 773 - RNA, 20 nt, Artificial Sequence
  C3-targeting RNA guide sequence portion
cucccucuuggcaaagaacu

SEQ ID NO: 774 - RNA, 20 nt, Artificial Sequence
  C3-targeting RNA guide sequence portion
cucucccucuuggcaaagaa

SEQ ID NO: 775 - RNA, 20 nt, Artificial Sequence
  C3-targeting RNA guide sequence portion
cucuuggcaaagaacuccag

SEQ ID NO: 776 - RNA, 20 nt, Artificial Sequence
  C3-targeting RNA guide sequence portion
cugaaauccccagccgccuc

SEQ ID NO: 777 - RNA, 20 nt, Artificial Sequence
  C3-targeting RNA guide sequence portion
cugaagcuuuaucuggagug

SEQ ID NO: 778 - RNA, 20 nt, Artificial Sequence
  C3-targeting RNA guide sequence portion
cugagcugcaggugaggcgg

SEQ ID NO: 779 - RNA, 20 nt, Artificial Sequence
  C3-targeting RNA guide sequence portion
cugcagcucagcuccauccu

SEQ ID NO: 780 - RNA, 20 nt, Artificial Sequence
  C3-targeting RNA guide sequence portion
cugcaggugaggcggcuggg

SEQ ID NO: 781 - RNA, 20 nt, Artificial Sequence
  C3-targeting RNA guide sequence portion
cuggaguucuuugccaagag

SEQ ID NO: 782 - RNA, 20 nt, Artificial Sequence
  C3-targeting RNA guide sequence portion
cuggggauuucagccucucc

SEQ ID NO: 783 - RNA, 20 nt, Artificial Sequence
  C3-targeting RNA guide sequence portion
cuucaguuauaucucacgug

SEQ ID NO: 784 - RNA, 20 nt, Artificial Sequence
  C3-targeting RNA guide sequence portion
cuugaaaccucaccuguucc

SEQ ID NO: 785 - RNA, 20 nt, Artificial Sequence
  C3-targeting RNA guide sequence portion
cuuggcaaagaacuccagac

SEQ ID NO: 786 - RNA, 20 nt, Artificial Sequence
  C3-targeting RNA guide sequence portion
cuuuaucuggagugggggaa

SEQ ID NO: 787 - RNA, 20 nt, Artificial Sequence
  C3-targeting RNA guide sequence portion
cuuugccaagagggagaggc

SEQ ID NO: 788 - RNA, 20 nt, Artificial Sequence
  C3-targeting RNA guide sequence portion
gaaauccccagccgccucac

SEQ ID NO: 789 - RNA, 20 nt, Artificial Sequence
  C3-targeting RNA guide sequence portion
gaacaggugagguuucaagu

SEQ ID NO: 790 - RNA, 20 nt, Artificial Sequence
  C3-targeting RNA guide sequence portion
gaacuccagacacgugagau

SEQ ID NO: 791 - RNA, 20 nt, Artificial Sequence
  C3-targeting RNA guide sequence portion
gaagcuuuaucuggaguggg

SEQ ID NO: 792 - RNA, 20 nt, Artificial Sequence
  C3-targeting RNA guide sequence portion
gacacgugagauauaacuga

SEQ ID NO: 793 - RNA, 20 nt, Artificial Sequence
  C3-targeting RNA guide sequence portion
gagaggcugaaauccccagc

SEQ ID NO: 794 - RNA, 20 nt, Artificial Sequence
  C3-targeting RNA guide sequence portion
gagauauaacugaagcuuua

SEQ ID NO: 795 - RNA, 20 nt, Artificial Sequence
  C3-targeting RNA guide sequence portion
gagcugagcugcaggugagg

SEQ ID NO: 796 - RNA, 20 nt, Artificial Sequence
  C3-targeting RNA guide sequence portion
gagcugcaggugaggcggcu

SEQ ID NO: 797 - RNA, 20 nt, Artificial Sequence
  C3-targeting RNA guide sequence portion
gaggcggcuggggauuucag

SEQ ID NO: 798 - RNA, 20 nt, Artificial Sequence
  C3-targeting RNA guide sequence portion
gaggcugaaauccccagccg

SEQ ID NO: 799 - RNA, 20 nt, Artificial Sequence
  C3-targeting RNA guide sequence portion
gagggagaggcugaaauccc

SEQ ID NO: 800 - RNA, 20 nt, Artificial Sequence
  C3-targeting RNA guide sequence portion
gagguuucaaguaggaugga

SEQ ID NO: 801 - RNA, 20 nt, Artificial Sequence
  C3-targeting RNA guide sequence portion
gaguucuuugccaagaggga

SEQ ID NO: 802 - RNA, 20 nt, Artificial Sequence
  C3-targeting RNA guide sequence portion
gauaaagcuucaguuauauc

SEQ ID NO: 803 - RNA, 20 nt, Artificial Sequence
  C3-targeting RNA guide sequence portion
gauauaacugaagcuuuauc

SEQ ID NO: 804 - RNA, 20 nt, Artificial Sequence
  C3-targeting RNA guide sequence portion
gauggagcugagcugcaggu

SEQ ID NO: 805 - RNA, 20 nt, Artificial Sequence
  C3-targeting RNA guide sequence portion
gauuucagccucucccucuu

SEQ ID NO: 806 - RNA, 20 nt, Artificial Sequence
  C3-targeting RNA guide sequence portion
gcaaagaacuccagacacgu

SEQ ID NO: 807 - RNA, 20 nt, Artificial Sequence
  C3-targeting RNA guide sequence portion
gcagcucagcuccauccuac

SEQ ID NO: 808 - RNA, 20 nt, Artificial Sequence
  C3-targeting RNA guide sequence portion
gcaggugaggcggcugggga

SEQ ID NO: 809 - RNA, 20 nt, Artificial Sequence
  C3-targeting RNA guide sequence portion
gccaagagggagaggcugaa

SEQ ID NO: 810 - RNA, 20 nt, Artificial Sequence
  C3-targeting RNA guide sequence portion
gccgccucaccugcagcuca

SEQ ID NO: 811 - RNA, 20 nt, Artificial Sequence
  C3-targeting RNA guide sequence portion
gccucaccugcagcucagcu

SEQ ID NO: 812 - RNA, 20 nt, Artificial Sequence
  C3-targeting RNA guide sequence portion
gccucucccucuuggcaaag

SEQ ID NO: 813 - RNA, 20 nt, Artificial Sequence
  C3-targeting RNA guide sequence portion
gcggcuggggauuucagccu

SEQ ID NO: 814 - RNA, 20 nt, Artificial Sequence
  C3-targeting RNA guide sequence portion
gcggugggaacaggugaggu

SEQ ID NO: 815 - RNA, 20 nt, Artificial Sequence
  C3-targeting RNA guide sequence portion
gcucagcuccauccuacuug

SEQ ID NO: 816 - RNA, 20 nt, Artificial Sequence
  C3-targeting RNA guide sequence portion
gcuccauccuacuugaaacc

SEQ ID NO: 817 - RNA, 20 nt, Artificial Sequence
  C3-targeting RNA guide sequence portion
gcugaaauccccagccgccu

SEQ ID NO: 818 - RNA, 20 nt, Artificial Sequence
  C3-targeting RNA guide sequence portion
gcugagcugcaggugaggcg

SEQ ID NO: 819 - RNA, 20 nt, Artificial Sequence
  C3-targeting RNA guide sequence portion
gcugcaggugaggcggcugg

SEQ ID NO: 820 - RNA, 20 nt, Artificial Sequence
  C3-targeting RNA guide sequence portion
gcuggggauuucagccucuc

SEQ ID NO: 821 - RNA, 20 nt, Artificial Sequence
  C3-targeting RNA guide sequence portion
gcuucaguuauaucucacgu

SEQ ID NO: 822 - RNA, 20 nt, Artificial Sequence
  C3-targeting RNA guide sequence portion
gcuuuaucuggaguggggga

SEQ ID NO: 823 - RNA, 20 nt, Artificial Sequence
  C3-targeting RNA guide sequence portion
ggaacaggugagguuucaag

SEQ ID NO: 824 - RNA, 20 nt, Artificial Sequence
  C3-targeting RNA guide sequence portion
ggagaggcugaaauccccag

SEQ ID NO: 825 - RNA, 20 nt, Artificial Sequence
  C3-targeting RNA guide sequence portion
ggagcugagcugcaggugag

SEQ ID NO: 826 - RNA, 20 nt, Artificial Sequence
  C3-targeting RNA guide sequence portion
ggaguucuuugccaagaggg

SEQ ID NO: 827 - RNA, 20 nt, Artificial Sequence
  C3-targeting RNA guide sequence portion
ggauggagcugagcugcagg

SEQ ID NO: 828 - RNA, 20 nt, Artificial Sequence
  C3-targeting RNA guide sequence portion
ggauuucagccucucccucu

SEQ ID NO: 829 - RNA, 20 nt, Artificial Sequence
  C3-targeting RNA guide sequence portion
ggcaaagaacuccagacacg

SEQ ID NO: 830 - RNA, 20 nt, Artificial Sequence
  C3-targeting RNA guide sequence portion
ggcggcuggggauuucagcc

SEQ ID NO: 831 - RNA, 20 nt, Artificial Sequence
  C3-targeting RNA guide sequence portion
ggcugaaauccccagccgcc

SEQ ID NO: 832 - RNA, 20 nt, Artificial Sequence
  C3-targeting RNA guide sequence portion
ggcuggggauuucagccucu

SEQ ID NO: 833 - RNA, 20 nt, Artificial Sequence
  C3-targeting RNA guide sequence portion
gggaacaggugagguuucaa

SEQ ID NO: 834 - RNA, 20 nt, Artificial Sequence
  C3-targeting RNA guide sequence portion
gggagaggcugaaaucccca

SEQ ID NO: 835 - RNA, 20 nt, Artificial Sequence
  C3-targeting RNA guide sequence portion
gggauuucagccucucccuc

SEQ ID NO: 836 - RNA, 20 nt, Artificial Sequence
  C3-targeting RNA guide sequence portion
ggggauuucagccucucccu

SEQ ID NO: 837 - RNA, 20 nt, Artificial Sequence
  C3-targeting RNA guide sequence portion
ggugaggcggcuggggauuu

SEQ ID NO: 838 - RNA, 20 nt, Artificial Sequence
  C3-targeting RNA guide sequence portion
ggugagguuucaaguaggau

SEQ ID NO: 839 - RNA, 20 nt, Artificial Sequence
  C3-targeting RNA guide sequence portion
ggugggaacaggugagguuu

SEQ ID NO: 840 - RNA, 20 nt, Artificial Sequence
  C3-targeting RNA guide sequence portion
gguuucaaguaggauggagc

SEQ ID NO: 841 - RNA, 20 nt, Artificial Sequence
  C3-targeting RNA guide sequence portion
guaggauggagcugagcugc

SEQ ID NO: 842 - RNA, 20 nt, Artificial Sequence
  C3-targeting RNA guide sequence portion
gucuggaguucuuugccaag

SEQ ID NO: 843 - RNA, 20 nt, Artificial Sequence
  C3-targeting RNA guide sequence portion
gugagauauaacugaagcuu

SEQ ID NO: 844 - RNA, 20 nt, Artificial Sequence
  C3-targeting RNA guide sequence portion
gugaggcggcuggggauuuc

SEQ ID NO: 845 - RNA, 20 nt, Artificial Sequence
  C3-targeting RNA guide sequence portion
gugagguuucaaguaggaug

SEQ ID NO: 846 - RNA, 20 nt, Artificial Sequence
  C3-targeting RNA guide sequence portion
gugggaacaggugagguuuc

SEQ ID NO: 847 - RNA, 20 nt, Artificial Sequence
  C3-targeting RNA guide sequence portion
gugucuggaguucuuugcca

SEQ ID NO: 848 - RNA, 20 nt, Artificial Sequence
  C3-targeting RNA guide sequence portion
guuauaucucacgugucugg

SEQ ID NO: 849 - RNA, 20 nt, Artificial Sequence
  C3-targeting RNA guide sequence portion
guucuuugccaagagggaga

SEQ ID NO: 850 - RNA, 20 nt, Artificial Sequence
  C3-targeting RNA guide sequence portion
guuucaaguaggauggagcu

SEQ ID NO: 851 - RNA, 20 nt, Artificial Sequence
  C3-targeting RNA guide sequence portion
uaaagcuucaguuauaucuc

SEQ ID NO: 852 - RNA, 20 nt, Artificial Sequence
  C3-targeting RNA guide sequence portion
uaacugaagcuuuaucugga

SEQ ID NO: 853 - RNA, 20 nt, Artificial Sequence
  C3-targeting RNA guide sequence portion
uacuugaaaccucaccuguu

SEQ ID NO: 854 - RNA, 20 nt, Artificial Sequence
  C3-targeting RNA guide sequence portion
uaggauggagcugagcugca

SEQ ID NO: 855 - RNA, 20 nt, Artificial Sequence
  C3-targeting RNA guide sequence portion
uauaacugaagcuuuaucug

SEQ ID NO: 856 - RNA, 20 nt, Artificial Sequence
  C3-targeting RNA guide sequence portion
uauaucucacgugucuggag

SEQ ID NO: 857 - RNA, 20 nt, Artificial Sequence
  C3-targeting RNA guide sequence portion
uaucucacgugucuggaguu

SEQ ID NO: 858 - RNA, 20 nt, Artificial Sequence
  C3-targeting RNA guide sequence portion
uaucuggagugggggaaugg

SEQ ID NO: 859 - RNA, 20 nt, Artificial Sequence
  C3-targeting RNA guide sequence portion
ucaaguaggauggagcugag

SEQ ID NO: 860 - RNA, 20 nt, Artificial Sequence
  C3-targeting RNA guide sequence portion
ucaccugcagcucagcucca

SEQ ID NO: 861 - RNA, 20 nt, Artificial Sequence
  C3-targeting RNA guide sequence portion
ucacgugucuggaguucuuu

SEQ ID NO: 862 - RNA, 20 nt, Artificial Sequence
  C3-targeting RNA guide sequence portion
ucagccucucccucuuggca

SEQ ID NO: 863 - RNA, 20 nt, Artificial Sequence
  C3-targeting RNA guide sequence portion
ucagcuccauccuacuugaa

SEQ ID NO: 864 - RNA, 20 nt, Artificial Sequence
  C3-targeting RNA guide sequence portion
ucaguuauaucucacguguc

SEQ ID NO: 865 - RNA, 20 nt, Artificial Sequence
  C3-targeting RNA guide sequence portion
uccagacacgugagauauaa

SEQ ID NO: 866 - RNA, 20 nt, Artificial Sequence
  C3-targeting RNA guide sequence portion
uccagauaaagcuucaguua

SEQ ID NO: 867 - RNA, 20 nt, Artificial Sequence
  C3-targeting RNA guide sequence portion
uccauccuacuugaaaccuc

SEQ ID NO: 868 - RNA, 20 nt, Artificial Sequence
  C3-targeting RNA guide sequence portion
uccccagccgccucaccugc

SEQ ID NO: 869 - RNA, 20 nt, Artificial Sequence
  C3-targeting RNA guide sequence portion
ucccccacuccagauaaagc

SEQ ID NO: 870 - RNA, 20 nt, Artificial Sequence
  C3-targeting RNA guide sequence portion
ucccucuuggcaaagaacuc

SEQ ID NO: 871 - RNA, 20 nt, Artificial Sequence
  C3-targeting RNA guide sequence portion
uccuacuugaaaccucaccu

SEQ ID NO: 872 - RNA, 20 nt, Artificial Sequence
  C3-targeting RNA guide sequence portion
ucucacgugucuggaguucu

SEQ ID NO: 873 - RNA, 20 nt, Artificial Sequence
  C3-targeting RNA guide sequence portion
ucucccucuuggcaaagaac

SEQ ID NO: 874 - RNA, 20 nt, Artificial Sequence
  C3-targeting RNA guide sequence portion
ucuggagugggggaaugggg

SEQ ID NO: 875 - RNA, 20 nt, Artificial Sequence
  C3-targeting RNA guide sequence portion
ucuggaguucuuugccaaga

SEQ ID NO: 876 - RNA, 20 nt, Artificial Sequence
  C3-targeting RNA guide sequence portion
ucuuggcaaagaacuccaga

SEQ ID NO: 877 - RNA, 20 nt, Artificial Sequence
  C3-targeting RNA guide sequence portion
ucuuugccaagagggagagg

SEQ ID NO: 878 - RNA, 20 nt, Artificial Sequence
  C3-targeting RNA guide sequence portion
ugaaaccucaccuguuccca

SEQ ID NO: 879 - RNA, 20 nt, Artificial Sequence
  C3-targeting RNA guide sequence portion
ugaaauccccagccgccuca

SEQ ID NO: 880 - RNA, 20 nt, Artificial Sequence
  C3-targeting RNA guide sequence portion
ugaagcuuuaucuggagugg

SEQ ID NO: 881 - RNA, 20 nt, Artificial Sequence
  C3-targeting RNA guide sequence portion
ugagauauaacugaagcuuu

SEQ ID NO: 882 - RNA, 20 nt, Artificial Sequence
  C3-targeting RNA guide sequence portion
ugagcugcaggugaggcggc

SEQ ID NO: 883 - RNA, 20 nt, Artificial Sequence
  C3-targeting RNA guide sequence portion
ugaggcggcuggggauuuca

SEQ ID NO: 884 - RNA, 20 nt, Artificial Sequence
  C3-targeting RNA guide sequence portion
ugagguuucaaguaggaugg

SEQ ID NO: 885 - RNA, 20 nt, Artificial Sequence
  C3-targeting RNA guide sequence portion
ugcagcucagcuccauccua

SEQ ID NO: 886 - RNA, 20 nt, Artificial Sequence
  C3-targeting RNA guide sequence portion
ugcaggugaggcggcugggg

SEQ ID NO: 887 - RNA, 20 nt, Artificial Sequence
  C3-targeting RNA guide sequence portion
ugccaagagggagaggcuga

SEQ ID NO: 888 - RNA, 20 nt, Artificial Sequence
  C3-targeting RNA guide sequence portion
ugcggugggaacaggugagg

SEQ ID NO: 889 - RNA, 20 nt, Artificial Sequence
  C3-targeting RNA guide sequence portion
uggagcugagcugcagguga

SEQ ID NO: 890 - RNA, 20 nt, Artificial Sequence
  C3-targeting RNA guide sequence portion
uggaguucuuugccaagagg

SEQ ID NO: 891 - RNA, 20 nt, Artificial Sequence
  C3-targeting RNA guide sequence portion
uggcaaagaacuccagacac

SEQ ID NO: 892 - RNA, 20 nt, Artificial Sequence
  C3-targeting RNA guide sequence portion
ugggaacaggugagguuuca

SEQ ID NO: 893 - RNA, 20 nt, Artificial Sequence
  C3-targeting RNA guide sequence portion
uggggauuucagccucuccc

SEQ ID NO: 894 - RNA, 20 nt, Artificial Sequence
  C3-targeting RNA guide sequence portion
ugucuggaguucuuugccaa

SEQ ID NO: 895 - RNA, 20 nt, Artificial Sequence
  C3-targeting RNA guide sequence portion
uuauaucucacgugucugga

SEQ ID NO: 896 - RNA, 20 nt, Artificial Sequence
  C3-targeting RNA guide sequence portion
uuaucuggagugggggaaug

SEQ ID NO: 897 - RNA, 20 nt, Artificial Sequence
  C3-targeting RNA guide sequence portion
uucaaguaggauggagcuga

SEQ ID NO: 898 - RNA, 20 nt, Artificial Sequence
  C3-targeting RNA guide sequence portion
uucagccucucccucuuggc

SEQ ID NO: 899 - RNA, 20 nt, Artificial Sequence
  C3-targeting RNA guide sequence portion
uucaguuauaucucacgugu

SEQ ID NO: 900 - RNA, 20 nt, Artificial Sequence
  C3-targeting RNA guide sequence portion
uucccccacuccagauaaag

SEQ ID NO: 901 - RNA, 20 nt, Artificial Sequence
  C3-targeting RNA guide sequence portion
uucuuugccaagagggagag

SEQ ID NO: 902 - RNA, 20 nt, Artificial Sequence
  C3-targeting RNA guide sequence portion
uugaaaccucaccuguuccc

SEQ ID NO: 903 - RNA, 20 nt, Artificial Sequence
  C3-targeting RNA guide sequence portion
uugccaagagggagaggcug

SEQ ID NO: 904 - RNA, 20 nt, Artificial Sequence
  C3-targeting RNA guide sequence portion
uuggcaaagaacuccagaca

SEQ ID NO: 905 - RNA, 20 nt, Artificial Sequence
  C3-targeting RNA guide sequence portion
uuuaucuggagugggggaau

SEQ ID NO: 906 - RNA, 20 nt, Artificial Sequence
  C3-targeting RNA guide sequence portion
uuucaaguaggauggagcug

SEQ ID NO: 907 - RNA, 20 nt, Artificial Sequence
  C3-targeting RNA guide sequence portion
uuucagccucucccucuugg

SEQ ID NO: 908 - RNA, 20 nt, Artificial Sequence
  C3-targeting RNA guide sequence portion
uuugccaagagggagaggcu

SEQ ID NO: 909 - RNA, 21 nt, Artificial Sequence
  C3-targeting RNA guide sequence portion
aaagaacuccagacacgugag

SEQ ID NO: 910 - RNA, 21 nt, Artificial Sequence
  C3-targeting RNA guide sequence portion
aaagcuucaguuauaucucac

SEQ ID NO: 911 - RNA, 21 nt, Artificial Sequence
  C3-targeting RNA guide sequence portion
aaauccccagccgccucaccu

SEQ ID NO: 912 - RNA, 21 nt, Artificial Sequence
  C3-targeting RNA guide sequence portion
aacaggugagguuucaaguag

SEQ ID NO: 913 - RNA, 21 nt, Artificial Sequence
  C3-targeting RNA guide sequence portion
aacuccagacacgugagauau

SEQ ID NO: 914 - RNA, 21 nt, Artificial Sequence
  C3-targeting RNA guide sequence portion
aacugaagcuuuaucuggagu

SEQ ID NO: 915 - RNA, 21 nt, Artificial Sequence
  C3-targeting RNA guide sequence portion
aagaacuccagacacgugaga

SEQ ID NO: 916 - RNA, 21 nt, Artificial Sequence
  C3-targeting RNA guide sequence portion
aagagggagaggcugaaaucc

SEQ ID NO: 917 - RNA, 21 nt, Artificial Sequence
  C3-targeting RNA guide sequence portion
aagcuucaguuauaucucacg

SEQ ID NO: 918 - RNA, 21 nt, Artificial Sequence
  C3-targeting RNA guide sequence portion
aagcuuuaucuggaguggggg

SEQ ID NO: 919 - RNA, 21 nt, Artificial Sequence
  C3-targeting RNA guide sequence portion
aaguaggauggagcugagcug

SEQ ID NO: 920 - RNA, 21 nt, Artificial Sequence
  C3-targeting RNA guide sequence portion
aauccccagccgccucaccug

SEQ ID NO: 921 - RNA, 21 nt, Artificial Sequence
  C3-targeting RNA guide sequence portion
acacccccauucccccacucc

SEQ ID NO: 922 - RNA, 21 nt, Artificial Sequence
  C3-targeting RNA guide sequence portion
acacgugagauauaacugaag

SEQ ID NO: 923 - RNA, 21 nt, Artificial Sequence
  C3-targeting RNA guide sequence portion
acaggugagguuucaaguagg

SEQ ID NO: 924 - RNA, 21 nt, Artificial Sequence
  C3-targeting RNA guide sequence portion
acccccauucccccacuccag

SEQ ID NO: 925 - RNA, 21 nt, Artificial Sequence
  C3-targeting RNA guide sequence portion
accugcagcucagcuccaucc

SEQ ID NO: 926 - RNA, 21 nt, Artificial Sequence
  C3-targeting RNA guide sequence portion
acgugagauauaacugaagcu

SEQ ID NO: 927 - RNA, 21 nt, Artificial Sequence
  C3-targeting RNA guide sequence portion
acgugucuggaguucuuugcc

SEQ ID NO: 928 - RNA, 21 nt, Artificial Sequence
  C3-targeting RNA guide sequence portion
acuccagacacgugagauaua

SEQ ID NO: 929 - RNA, 21 nt, Artificial Sequence
  C3-targeting RNA guide sequence portion
acuccagauaaagcuucaguu

SEQ ID NO: 930 - RNA, 21 nt, Artificial Sequence
  C3-targeting RNA guide sequence portion
acugaagcuuuaucuggagug

SEQ ID NO: 931 - RNA, 21 nt, Artificial Sequence
  C3-targeting RNA guide sequence portion
acuugaaaccucaccuguucc

SEQ ID NO: 932 - RNA, 21 nt, Artificial Sequence
  C3-targeting RNA guide sequence portion
agaacuccagacacgugagau

SEQ ID NO: 933 - RNA, 21 nt, Artificial Sequence
  C3-targeting RNA guide sequence portion
agacacgugagauauaacuga

SEQ ID NO: 934 - RNA, 21 nt, Artificial Sequence
  C3-targeting RNA guide sequence portion
agaggcugaaauccccagccg

SEQ ID NO: 935 - RNA, 21 nt, Artificial Sequence
  C3-targeting RNA guide sequence portion
agagggagaggcugaaauccc

SEQ ID NO: 936 - RNA, 21 nt, Artificial Sequence
  C3-targeting RNA guide sequence portion
agauaaagcuucaguuauauc

SEQ ID NO: 937 - RNA, 21 nt, Artificial Sequence
  C3-targeting RNA guide sequence portion
agauauaacugaagcuuuauc

SEQ ID NO: 938 - RNA, 21 nt, Artificial Sequence
  C3-targeting RNA guide sequence portion
agccgccucaccugcagcuca

SEQ ID NO: 939 - RNA, 21 nt, Artificial Sequence
  C3-targeting RNA guide sequence portion
agccucucccucuuggcaaag

SEQ ID NO: 940 - RNA, 21 nt, Artificial Sequence
  C3-targeting RNA guide sequence portion
agcucagcuccauccuacuug

SEQ ID NO: 941 - RNA, 21 nt, Artificial Sequence
  C3-targeting RNA guide sequence portion
agcuccauccuacuugaaacc

SEQ ID NO: 942 - RNA, 21 nt, Artificial Sequence
  C3-targeting RNA guide sequence portion
agcugagcugcaggugaggcg

SEQ ID NO: 943 - RNA, 21 nt, Artificial Sequence
  C3-targeting RNA guide sequence portion
agcugcaggugaggcggcugg

SEQ ID NO: 944 - RNA, 21 nt, Artificial Sequence
  C3-targeting RNA guide sequence portion
agcuucaguuauaucucacgu

SEQ ID NO: 945 - RNA, 21 nt, Artificial Sequence
  C3-targeting RNA guide sequence portion
agcuuuaucuggaguggggga

SEQ ID NO: 946 - RNA, 21 nt, Artificial Sequence
  C3-targeting RNA guide sequence portion
aggauggagcugagcugcagg

SEQ ID NO: 947 - RNA, 21 nt, Artificial Sequence
  C3-targeting RNA guide sequence portion
aggcggcuggggauuucagcc

SEQ ID NO: 948 - RNA, 21 nt, Artificial Sequence
  C3-targeting RNA guide sequence portion
aggcugaaauccccagccgcc

SEQ ID NO: 949 - RNA, 21 nt, Artificial Sequence
  C3-targeting RNA guide sequence portion
agggagaggcugaaaucccca

SEQ ID NO: 950 - RNA, 21 nt, Artificial Sequence
  C3-targeting RNA guide sequence portion
aggugaggcggcuggggauuu

SEQ ID NO: 951 - RNA, 21 nt, Artificial Sequence
  C3-targeting RNA guide sequence portion
aggugagguuucaaguaggau

SEQ ID NO: 952 - RNA, 21 nt, Artificial Sequence
  C3-targeting RNA guide sequence portion
agguuucaaguaggauggagc

SEQ ID NO: 953 - RNA, 21 nt, Artificial Sequence
  C3-targeting RNA guide sequence portion
aguaggauggagcugagcugc

SEQ ID NO: 954 - RNA, 21 nt, Artificial Sequence
  C3-targeting RNA guide sequence portion
aguuauaucucacgugucugg

SEQ ID NO: 955 - RNA, 21 nt, Artificial Sequence
  C3-targeting RNA guide sequence portion
aguucuuugccaagagggaga

SEQ ID NO: 956 - RNA, 21 nt, Artificial Sequence
  C3-targeting RNA guide sequence portion
auaaagcuucaguuauaucuc

SEQ ID NO: 957 - RNA, 21 nt, Artificial Sequence
  C3-targeting RNA guide sequence portion
auaacugaagcuuuaucugga

SEQ ID NO: 958 - RNA, 21 nt, Artificial Sequence
  C3-targeting RNA guide sequence portion
auauaacugaagcuuuaucug

SEQ ID NO: 959 - RNA, 21 nt, Artificial Sequence
  C3-targeting RNA guide sequence portion
auaucucacgugucuggaguu

SEQ ID NO: 960 - RNA, 21 nt, Artificial Sequence
  C3-targeting RNA guide sequence portion
auccccagccgccucaccugc

SEQ ID NO: 961 - RNA, 21 nt, Artificial Sequence
  C3-targeting RNA guide sequence portion
auccuacuugaaaccucaccu

SEQ ID NO: 962 - RNA, 21 nt, Artificial Sequence
  C3-targeting RNA guide sequence portion
aucucacgugucuggaguucu

SEQ ID NO: 963 - RNA, 21 nt, Artificial Sequence
  C3-targeting RNA guide sequence portion
aucuggagugggggaaugggg

SEQ ID NO: 964 - RNA, 21 nt, Artificial Sequence
  C3-targeting RNA guide sequence portion
augcggugggaacaggugagg

SEQ ID NO: 965 - RNA, 21 nt, Artificial Sequence
  C3-targeting RNA guide sequence portion
auggagcugagcugcagguga

SEQ ID NO: 966 - RNA, 21 nt, Artificial Sequence
  C3-targeting RNA guide sequence portion
auucccccacuccagauaaag

SEQ ID NO: 967 - RNA, 21 nt, Artificial Sequence
  C3-targeting RNA guide sequence portion
auuucagccucucccucuugg

SEQ ID NO: 968 - RNA, 21 nt, Artificial Sequence
  C3-targeting RNA guide sequence portion
caaagaacuccagacacguga

SEQ ID NO: 969 - RNA, 21 nt, Artificial Sequence
  C3-targeting RNA guide sequence portion
caagagggagaggcugaaauc

SEQ ID NO: 970 - RNA, 21 nt, Artificial Sequence
  C3-targeting RNA guide sequence portion
caaguaggauggagcugagcu

SEQ ID NO: 971 - RNA, 21 nt, Artificial Sequence
  C3-targeting RNA guide sequence portion
cacacccccauucccccacuc

SEQ ID NO: 972 - RNA, 21 nt, Artificial Sequence
  C3-targeting RNA guide sequence portion
cacccccauucccccacucca

SEQ ID NO: 973 - RNA, 21 nt, Artificial Sequence
  C3-targeting RNA guide sequence portion
caccugcagcucagcuccauc

SEQ ID NO: 974 - RNA, 21 nt, Artificial Sequence
  C3-targeting RNA guide sequence portion
cacgugagauauaacugaagc

SEQ ID NO: 975 - RNA, 21 nt, Artificial Sequence
  C3-targeting RNA guide sequence portion
cacgugucuggaguucuuugc

SEQ ID NO: 976 - RNA, 21 nt, Artificial Sequence
  C3-targeting RNA guide sequence portion
cacuccagauaaagcuucagu

SEQ ID NO: 977 - RNA, 21 nt, Artificial Sequence
  C3-targeting RNA guide sequence portion
cagacacgugagauauaacug

SEQ ID NO: 978 - RNA, 21 nt, Artificial Sequence
  C3-targeting RNA guide sequence portion
cagauaaagcuucaguuauau

SEQ ID NO: 979 - RNA, 21 nt, Artificial Sequence
  C3-targeting RNA guide sequence portion
cagccgccucaccugcagcuc

SEQ ID NO: 980 - RNA, 21 nt, Artificial Sequence
  C3-targeting RNA guide sequence portion
cagccucucccucuuggcaaa

SEQ ID NO: 981 - RNA, 21 nt, Artificial Sequence
  C3-targeting RNA guide sequence portion
cagcucagcuccauccuacuu

SEQ ID NO: 982 - RNA, 21 nt, Artificial Sequence
  C3-targeting RNA guide sequence portion
cagcuccauccuacuugaaac

SEQ ID NO: 983 - RNA, 21 nt, Artificial Sequence
  C3-targeting RNA guide sequence portion
caggugaggcggcuggggauu

SEQ ID NO: 984 - RNA, 21 nt, Artificial Sequence
  C3-targeting RNA guide sequence portion
caggugagguuucaaguagga

SEQ ID NO: 985 - RNA, 21 nt, Artificial Sequence
  C3-targeting RNA guide sequence portion
caguuauaucucacgugucug

SEQ ID NO: 986 - RNA, 21 nt, Artificial Sequence
  C3-targeting RNA guide sequence portion
cauccuacuugaaaccucacc

SEQ ID NO: 987 - RNA, 21 nt, Artificial Sequence
  C3-targeting RNA guide sequence portion
cauucccccacuccagauaaa

SEQ ID NO: 988 - RNA, 21 nt, Artificial Sequence
  C3-targeting RNA guide sequence portion
ccaagagggagaggcugaaau

SEQ ID NO: 989 - RNA, 21 nt, Artificial Sequence
  C3-targeting RNA guide sequence portion
ccacacccccauucccccacu

SEQ ID NO: 990 - RNA, 21 nt, Artificial Sequence
  C3-targeting RNA guide sequence portion
ccacuccagauaaagcuucag

SEQ ID NO: 991 - RNA, 21 nt, Artificial Sequence
  C3-targeting RNA guide sequence portion
ccagacacgugagauauaacu

SEQ ID NO: 992 - RNA, 21 nt, Artificial Sequence
  C3-targeting RNA guide sequence portion
ccagauaaagcuucaguuaua

SEQ ID NO: 993 - RNA, 21 nt, Artificial Sequence
  C3-targeting RNA guide sequence portion
ccagccgccucaccugcagcu

SEQ ID NO: 994 - RNA, 21 nt, Artificial Sequence
  C3-targeting RNA guide sequence portion
ccauccuacuugaaaccucac

SEQ ID NO: 995 - RNA, 21 nt, Artificial Sequence
  C3-targeting RNA guide sequence portion
ccauucccccacuccagauaa

SEQ ID NO: 996 - RNA, 21 nt, Artificial Sequence
  C3-targeting RNA guide sequence portion
cccacuccagauaaagcuuca

SEQ ID NO: 997 - RNA, 21 nt, Artificial Sequence
  C3-targeting RNA guide sequence portion
cccagccgccucaccugcagc

SEQ ID NO: 998 - RNA, 21 nt, Artificial Sequence
  C3-targeting RNA guide sequence portion
cccauucccccacuccagaua

SEQ ID NO: 999 - RNA, 21 nt, Artificial Sequence
  C3-targeting RNA guide sequence portion
ccccacuccagauaaagcuuc

SEQ ID NO: 1000 - RNA, 21 nt, Artificial Sequence
  C3-targeting RNA guide sequence portion
ccccagccgccucaccugcag

SEQ ID NO: 1001 - RNA, 21 nt, Artificial Sequence
  C3-targeting RNA guide sequence portion
ccccauucccccacuccagau

SEQ ID NO: 1002 - RNA, 21 nt, Artificial Sequence
  C3-targeting RNA guide sequence portion
cccccacuccagauaaagcuu

SEQ ID NO: 1003 - RNA, 21 nt, Artificial Sequence
  C3-targeting RNA guide sequence portion
cccccauucccccacuccaga

SEQ ID NO: 1004 - RNA, 21 nt, Artificial Sequence
  C3-targeting RNA guide sequence portion
cccucuuggcaaagaacucca

SEQ ID NO: 1005 - RNA, 21 nt, Artificial Sequence
  C3-targeting RNA guide sequence portion
ccgccucaccugcagcucagc

SEQ ID NO: 1006 - RNA, 21 nt, Artificial Sequence
  C3-targeting RNA guide sequence portion
ccuacuugaaaccucaccugu

SEQ ID NO: 1007 - RNA, 21 nt, Artificial Sequence
  C3-targeting RNA guide sequence portion
ccucaccugcagcucagcucc

SEQ ID NO: 1008 - RNA, 21 nt, Artificial Sequence
  C3-targeting RNA guide sequence portion
ccucucccucuuggcaaagaa

SEQ ID NO: 1009 - RNA, 21 nt, Artificial Sequence
  C3-targeting RNA guide sequence portion
ccucuuggcaaagaacuccag

SEQ ID NO: 1010 - RNA, 21 nt, Artificial Sequence
  C3-targeting RNA guide sequence portion
ccugcagcucagcuccauccu

SEQ ID NO: 1011 - RNA, 21 nt, Artificial Sequence
  C3-targeting RNA guide sequence portion
cgccucaccugcagcucagcu

SEQ ID NO: 1012 - RNA, 21 nt, Artificial Sequence
  C3-targeting RNA guide sequence portion
cggcuggggauuucagccucu

SEQ ID NO: 1013 - RNA, 21 nt, Artificial Sequence
  C3-targeting RNA guide sequence portion
cggugggaacaggugagguuu

SEQ ID NO: 1014 - RNA, 21 nt, Artificial Sequence
  C3-targeting RNA guide sequence portion
cgugagauauaacugaagcuu

SEQ ID NO: 1015 - RNA, 21 nt, Artificial Sequence
  C3-targeting RNA guide sequence portion
cgugucuggaguucuuugcca

SEQ ID NO: 1016 - RNA, 21 nt, Artificial Sequence
  C3-targeting RNA guide sequence portion
cuacuugaaaccucaccuguu

SEQ ID NO: 1017 - RNA, 21 nt, Artificial Sequence
  C3-targeting RNA guide sequence portion
cucaccugcagcucagcucca

SEQ ID NO: 1018 - RNA, 21 nt, Artificial Sequence
  C3-targeting RNA guide sequence portion
cucacgugucuggaguucuuu

SEQ ID NO: 1019 - RNA, 21 nt, Artificial Sequence
  C3-targeting RNA guide sequence portion
cucagcuccauccuacuugaa

SEQ ID NO: 1020 - RNA, 21 nt, Artificial Sequence
  C3-targeting RNA guide sequence portion
cuccagacacgugagauauaa

SEQ ID NO: 1021 - RNA, 21 nt, Artificial Sequence
  C3-targeting RNA guide sequence portion
cuccagauaaagcuucaguua

SEQ ID NO: 1022 - RNA, 21 nt, Artificial Sequence
  C3-targeting RNA guide sequence portion
cuccauccuacuugaaaccuc

SEQ ID NO: 1023 - RNA, 21 nt, Artificial Sequence
  C3-targeting RNA guide sequence portion
cucccucuuggcaaagaacuc

SEQ ID NO: 1024 - RNA, 21 nt, Artificial Sequence
  C3-targeting RNA guide sequence portion
cucucccucuuggcaaagaac

SEQ ID NO: 1025 - RNA, 21 nt, Artificial Sequence
  C3-targeting RNA guide sequence portion
cucuuggcaaagaacuccaga

SEQ ID NO: 1026 - RNA, 21 nt, Artificial Sequence
  C3-targeting RNA guide sequence portion
cugaaauccccagccgccuca

SEQ ID NO: 1027 - RNA, 21 nt, Artificial Sequence
  C3-targeting RNA guide sequence portion
cugaagcuuuaucuggagugg

SEQ ID NO: 1028 - RNA, 21 nt, Artificial Sequence
  C3-targeting RNA guide sequence portion
cugagcugcaggugaggcggc

SEQ ID NO: 1029 - RNA, 21 nt, Artificial Sequence
  C3-targeting RNA guide sequence portion
cugcagcucagcuccauccua

SEQ ID NO: 1030 - RNA, 21 nt, Artificial Sequence
  C3-targeting RNA guide sequence portion
cugcaggugaggcggcugggg

SEQ ID NO: 1031 - RNA, 21 nt, Artificial Sequence
  C3-targeting RNA guide sequence portion
cuggaguucuuugccaagagg

SEQ ID NO: 1032 - RNA, 21 nt, Artificial Sequence
  C3-targeting RNA guide sequence portion
cuggggauuucagccucuccc

SEQ ID NO: 1033 - RNA, 21 nt, Artificial Sequence
  C3-targeting RNA guide sequence portion
cuucaguuauaucucacgugu

SEQ ID NO: 1034 - RNA, 21 nt, Artificial Sequence
  C3-targeting RNA guide sequence portion
cuugaaaccucaccuguuccc

SEQ ID NO: 1035 - RNA, 21 nt, Artificial Sequence
  C3-targeting RNA guide sequence portion
cuuggcaaagaacuccagaca

SEQ ID NO: 1036 - RNA, 21 nt, Artificial Sequence
  C3-targeting RNA guide sequence portion
cuuuaucuggagugggggaau

SEQ ID NO: 1037 - RNA, 21 nt, Artificial Sequence
  C3-targeting RNA guide sequence portion
cuuugccaagagggagaggcu

SEQ ID NO: 1038 - RNA, 21 nt, Artificial Sequence
  C3-targeting RNA guide sequence portion
gaaauccccagccgccucacc

SEQ ID NO: 1039 - RNA, 21 nt, Artificial Sequence
  C3-targeting RNA guide sequence portion
gaacaggugagguuucaagua

SEQ ID NO: 1040 - RNA, 21 nt, Artificial Sequence
  C3-targeting RNA guide sequence portion
gaacuccagacacgugagaua

SEQ ID NO: 1041 - RNA, 21 nt, Artificial Sequence
  C3-targeting RNA guide sequence portion
gaagcuuuaucuggagugggg

SEQ ID NO: 1042 - RNA, 21 nt, Artificial Sequence
  C3-targeting RNA guide sequence portion
gacacgugagauauaacugaa

SEQ ID NO: 1043 - RNA, 21 nt, Artificial Sequence
  C3-targeting RNA guide sequence portion
gagaggcugaaauccccagcc

SEQ ID NO: 1044 - RNA, 21 nt, Artificial Sequence
  C3-targeting RNA guide sequence portion
gagauauaacugaagcuuuau

SEQ ID NO: 1045 - RNA, 21 nt, Artificial Sequence
  C3-targeting RNA guide sequence portion
gagcugagcugcaggugaggc

SEQ ID NO: 1046 - RNA, 21 nt, Artificial Sequence
  C3-targeting RNA guide sequence portion
gagcugcaggugaggcggcug

SEQ ID NO: 1047 - RNA, 21 nt, Artificial Sequence
  C3-targeting RNA guide sequence portion
gaggcggcuggggauuucagc

SEQ ID NO: 1048 - RNA, 21 nt, Artificial Sequence
  C3-targeting RNA guide sequence portion
gaggcugaaauccccagccgc

SEQ ID NO: 1049 - RNA, 21 nt, Artificial Sequence
  C3-targeting RNA guide sequence portion
gagggagaggcugaaaucccc

SEQ ID NO: 1050 - RNA, 21 nt, Artificial Sequence
  C3-targeting RNA guide sequence portion
gagguuucaaguaggauggag

SEQ ID NO: 1051 - RNA, 21 nt, Artificial Sequence
  C3-targeting RNA guide sequence portion
gaguucuuugccaagagggag

SEQ ID NO: 1052 - RNA, 21 nt, Artificial Sequence
  C3-targeting RNA guide sequence portion
gauaaagcuucaguuauaucu

SEQ ID NO: 1053 - RNA, 21 nt, Artificial Sequence
  C3-targeting RNA guide sequence portion
gauauaacugaagcuuuaucu

SEQ ID NO: 1054 - RNA, 21 nt, Artificial Sequence
  C3-targeting RNA guide sequence portion
gauggagcugagcugcaggug

SEQ ID NO: 1055 - RNA, 21 nt, Artificial Sequence
  C3-targeting RNA guide sequence portion
gauuucagccucucccucuug

SEQ ID NO: 1056 - RNA, 21 nt, Artificial Sequence
  C3-targeting RNA guide sequence portion
gcaaagaacuccagacacgug

SEQ ID NO: 1057 - RNA, 21 nt, Artificial Sequence
  C3-targeting RNA guide sequence portion
gcagcucagcuccauccuacu

SEQ ID NO: 1058 - RNA, 21 nt, Artificial Sequence
  C3-targeting RNA guide sequence portion
gcaggugaggcggcuggggau

SEQ ID NO: 1059 - RNA, 21 nt, Artificial Sequence
  C3-targeting RNA guide sequence portion
gccaagagggagaggcugaaa

SEQ ID NO: 1060 - RNA, 21 nt, Artificial Sequence
  C3-targeting RNA guide sequence portion
gccgccucaccugcagcucag

SEQ ID NO: 1061 - RNA, 21 nt, Artificial Sequence
  C3-targeting RNA guide sequence portion
gccucaccugcagcucagcuc

SEQ ID NO: 1062 - RNA, 21 nt, Artificial Sequence
  C3-targeting RNA guide sequence portion
gccucucccucuuggcaaaga

SEQ ID NO: 1063 - RNA, 21 nt, Artificial Sequence
  C3-targeting RNA guide sequence portion
gcggcuggggauuucagccuc

SEQ ID NO: 1064 - RNA, 21 nt, Artificial Sequence
  C3-targeting RNA guide sequence portion
gcggugggaacaggugagguu

SEQ ID NO: 1065 - RNA, 21 nt, Artificial Sequence
  C3-targeting RNA guide sequence portion
gcucagcuccauccuacuuga

SEQ ID NO: 1066 - RNA, 21 nt, Artificial Sequence
  C3-targeting RNA guide sequence portion
gcuccauccuacuugaaaccu

SEQ ID NO: 1067 - RNA, 21 nt, Artificial Sequence
  C3-targeting RNA guide sequence portion
gcugaaauccccagccgccuc

SEQ ID NO: 1068 - RNA, 21 nt, Artificial Sequence
  C3-targeting RNA guide sequence portion
gcugagcugcaggugaggcgg

SEQ ID NO: 1069 - RNA, 21 nt, Artificial Sequence
  C3-targeting RNA guide sequence portion
gcugcaggugaggcggcuggg

SEQ ID NO: 1070 - RNA, 21 nt, Artificial Sequence
  C3-targeting RNA guide sequence portion
gcuggggauuucagccucucc

SEQ ID NO: 1071 - RNA, 21 nt, Artificial Sequence
  C3-targeting RNA guide sequence portion
gcuucaguuauaucucacgug

SEQ ID NO: 1072 - RNA, 21 nt, Artificial Sequence
  C3-targeting RNA guide sequence portion
gcuuuaucuggagugggggaa

SEQ ID NO: 1073 - RNA, 21 nt, Artificial Sequence
  C3-targeting RNA guide sequence portion
ggaacaggugagguuucaagu

SEQ ID NO: 1074 - RNA, 21 nt, Artificial Sequence
  C3-targeting RNA guide sequence portion
ggagaggcugaaauccccagc

SEQ ID NO: 1075 - RNA, 21 nt, Artificial Sequence
  C3-targeting RNA guide sequence portion
ggagcugagcugcaggugagg

SEQ ID NO: 1076 - RNA, 21 nt, Artificial Sequence
  C3-targeting RNA guide sequence portion
ggaguucuuugccaagaggga

SEQ ID NO: 1077 - RNA, 21 nt, Artificial Sequence
  C3-targeting RNA guide sequence portion
ggauggagcugagcugcaggu

SEQ ID NO: 1078 - RNA, 21 nt, Artificial Sequence
  C3-targeting RNA guide sequence portion
ggauuucagccucucccucuu

SEQ ID NO: 1079 - RNA, 21 nt, Artificial Sequence
  C3-targeting RNA guide sequence portion
ggcaaagaacuccagacacgu

SEQ ID NO: 1080 - RNA, 21 nt, Artificial Sequence
  C3-targeting RNA guide sequence portion
ggcggcuggggauuucagccu

SEQ ID NO: 1081 - RNA, 21 nt, Artificial Sequence
  C3-targeting RNA guide sequence portion
ggcugaaauccccagccgccu

SEQ ID NO: 1082 - RNA, 21 nt, Artificial Sequence
  C3-targeting RNA guide sequence portion
ggcuggggauuucagccucuc

SEQ ID NO: 1083 - RNA, 21 nt, Artificial Sequence
  C3-targeting RNA guide sequence portion
gggaacaggugagguuucaag

SEQ ID NO: 1084 - RNA, 21 nt, Artificial Sequence
  C3-targeting RNA guide sequence portion
gggagaggcugaaauccccag

SEQ ID NO: 1085 - RNA, 21 nt, Artificial Sequence
  C3-targeting RNA guide sequence portion
gggauuucagccucucccucu

SEQ ID NO: 1086 - RNA, 21 nt, Artificial Sequence
  C3-targeting RNA guide sequence portion
ggggauuucagccucucccuc

SEQ ID NO: 1087 - RNA, 21 nt, Artificial Sequence
  C3-targeting RNA guide sequence portion
ggugaggcggcuggggauuuc

SEQ ID NO: 1088 - RNA, 21 nt, Artificial Sequence
  C3-targeting RNA guide sequence portion
ggugagguuucaaguaggaug

SEQ ID NO: 1089 - RNA, 21 nt, Artificial Sequence
  C3-targeting RNA guide sequence portion
ggugggaacaggugagguuuc

SEQ ID NO: 1090 - RNA, 21 nt, Artificial Sequence
  C3-targeting RNA guide sequence portion
gguuucaaguaggauggagcu

SEQ ID NO: 1091 - RNA, 21 nt, Artificial Sequence
  C3-targeting RNA guide sequence portion
guaggauggagcugagcugca

SEQ ID NO: 1092 - RNA, 21 nt, Artificial Sequence
  C3-targeting RNA guide sequence portion
gucuggaguucuuugccaaga

SEQ ID NO: 1093 - RNA, 21 nt, Artificial Sequence
  C3-targeting RNA guide sequence portion
gugagauauaacugaagcuuu

SEQ ID NO: 1094 - RNA, 21 nt, Artificial Sequence
  C3-targeting RNA guide sequence portion
gugaggcggcuggggauuuca

SEQ ID NO: 1095 - RNA, 21 nt, Artificial Sequence
  C3-targeting RNA guide sequence portion
gugagguuucaaguaggaugg

SEQ ID NO: 1096 - RNA, 21 nt, Artificial Sequence
  C3-targeting RNA guide sequence portion
gugggaacaggugagguuuca

SEQ ID NO: 1097 - RNA, 21 nt, Artificial Sequence
  C3-targeting RNA guide sequence portion
gugucuggaguucuuugccaa

SEQ ID NO: 1098 - RNA, 21 nt, Artificial Sequence
  C3-targeting RNA guide sequence portion
guuauaucucacgugucugga

SEQ ID NO: 1099 - RNA, 21 nt, Artificial Sequence
  C3-targeting RNA guide sequence portion
guucuuugccaagagggagag

SEQ ID NO: 1100 - RNA, 21 nt, Artificial Sequence
  C3-targeting RNA guide sequence portion
guuucaaguaggauggagcug

SEQ ID NO: 1101 - RNA, 21 nt, Artificial Sequence
  C3-targeting RNA guide sequence portion
uaaagcuucaguuauaucuca

SEQ ID NO: 1102 - RNA, 21 nt, Artificial Sequence
  C3-targeting RNA guide sequence portion
uaacugaagcuuuaucuggag

SEQ ID NO: 1103 - RNA, 21 nt, Artificial Sequence
  C3-targeting RNA guide sequence portion
uacuugaaaccucaccuguuc

SEQ ID NO: 1104 - RNA, 21 nt, Artificial Sequence
  C3-targeting RNA guide sequence portion
uaggauggagcugagcugcag

SEQ ID NO: 1105 - RNA, 21 nt, Artificial Sequence
  C3-targeting RNA guide sequence portion
uauaacugaagcuuuaucugg

SEQ ID NO: 1106 - RNA, 21 nt, Artificial Sequence
  C3-targeting RNA guide sequence portion
uauaucucacgugucuggagu

SEQ ID NO: 1107 - RNA, 21 nt, Artificial Sequence
  C3-targeting RNA guide sequence portion
uaucucacgugucuggaguuc

SEQ ID NO: 1108 - RNA, 21 nt, Artificial Sequence
  C3-targeting RNA guide sequence portion
uaucuggagugggggaauggg

SEQ ID NO: 1109 - RNA, 21 nt, Artificial Sequence
  C3-targeting RNA guide sequence portion
ucaaguaggauggagcugagc

SEQ ID NO: 1110 - RNA, 21 nt, Artificial Sequence
  C3-targeting RNA guide sequence portion
ucaccugcagcucagcuccau

SEQ ID NO: 1111 - RNA, 21 nt, Artificial Sequence
  C3-targeting RNA guide sequence portion
ucacgugucuggaguucuuug

SEQ ID NO: 1112 - RNA, 21 nt, Artificial Sequence
  C3-targeting RNA guide sequence portion
ucagccucucccucuuggcaa

SEQ ID NO: 1113 - RNA, 21 nt, Artificial Sequence
  C3-targeting RNA guide sequence portion
ucagcuccauccuacuugaaa

SEQ ID NO: 1114 - RNA, 21 nt, Artificial Sequence
  C3-targeting RNA guide sequence portion
ucaguuauaucucacgugucu

SEQ ID NO: 1115 - RNA, 21 nt, Artificial Sequence
  C3-targeting RNA guide sequence portion
uccagacacgugagauauaac

SEQ ID NO: 1116 - RNA, 21 nt, Artificial Sequence
  C3-targeting RNA guide sequence portion
uccagauaaagcuucaguuau

SEQ ID NO: 1117 - RNA, 21 nt, Artificial Sequence
  C3-targeting RNA guide sequence portion
uccauccuacuugaaaccuca

SEQ ID NO: 1118 - RNA, 21 nt, Artificial Sequence
  C3-targeting RNA guide sequence portion
uccccagccgccucaccugca

SEQ ID NO: 1119 - RNA, 21 nt, Artificial Sequence
  C3-targeting RNA guide sequence portion
ucccccacuccagauaaagcu

SEQ ID NO: 1120 - RNA, 21 nt, Artificial Sequence
  C3-targeting RNA guide sequence portion
ucccucuuggcaaagaacucc

SEQ ID NO: 1121 - RNA, 21 nt, Artificial Sequence
  C3-targeting RNA guide sequence portion
uccuacuugaaaccucaccug

SEQ ID NO: 1122 - RNA, 21 nt, Artificial Sequence
  C3-targeting RNA guide sequence portion
ucucacgugucuggaguucuu

SEQ ID NO: 1123 - RNA, 21 nt, Artificial Sequence
  C3-targeting RNA guide sequence portion
ucucccucuuggcaaagaacu

SEQ ID NO: 1124 - RNA, 21 nt, Artificial Sequence
  C3-targeting RNA guide sequence portion
ucuggaguucuuugccaagag

SEQ ID NO: 1125 - RNA, 21 nt, Artificial Sequence
  C3-targeting RNA guide sequence portion
ucuuggcaaagaacuccagac

SEQ ID NO: 1126 - RNA, 21 nt, Artificial Sequence
  C3-targeting RNA guide sequence portion
ucuuugccaagagggagaggc

SEQ ID NO: 1127 - RNA, 21 nt, Artificial Sequence
  C3-targeting RNA guide sequence portion
ugaaauccccagccgccucac

SEQ ID NO: 1128 - RNA, 21 nt, Artificial Sequence
  C3-targeting RNA guide sequence portion
ugaagcuuuaucuggaguggg

SEQ ID NO: 1129 - RNA, 21 nt, Artificial Sequence
  C3-targeting RNA guide sequence portion
ugagauauaacugaagcuuua

SEQ ID NO: 1130 - RNA, 21 nt, Artificial Sequence
  C3-targeting RNA guide sequence portion
ugagcugcaggugaggcggcu

SEQ ID NO: 1131 - RNA, 21 nt, Artificial Sequence
  C3-targeting RNA guide sequence portion
ugaggcggcuggggauuucag

SEQ ID NO: 1132 - RNA, 21 nt, Artificial Sequence
  C3-targeting RNA guide sequence portion
ugagguuucaaguaggaugga

SEQ ID NO: 1133 - RNA, 21 nt, Artificial Sequence
  C3-targeting RNA guide sequence portion
ugcagcucagcuccauccuac

SEQ ID NO: 1134 - RNA, 21 nt, Artificial Sequence
  C3-targeting RNA guide sequence portion
ugcaggugaggcggcugggga

SEQ ID NO: 1135 - RNA, 21 nt, Artificial Sequence
  C3-targeting RNA guide sequence portion
ugccaagagggagaggcugaa

SEQ ID NO: 1136 - RNA, 21 nt, Artificial Sequence
  C3-targeting RNA guide sequence portion
ugcggugggaacaggugaggu

SEQ ID NO: 1137 - RNA, 21 nt, Artificial Sequence
  C3-targeting RNA guide sequence portion
uggagcugagcugcaggugag

SEQ ID NO: 1138 - RNA, 21 nt, Artificial Sequence
  C3-targeting RNA guide sequence portion
uggaguucuuugccaagaggg

SEQ ID NO: 1139 - RNA, 21 nt, Artificial Sequence
  C3-targeting RNA guide sequence portion
uggcaaagaacuccagacacg

SEQ ID NO: 1140 - RNA, 21 nt, Artificial Sequence
  C3-targeting RNA guide sequence portion
ugggaacaggugagguuucaa

SEQ ID NO: 1141 - RNA, 21 nt, Artificial Sequence
  C3-targeting RNA guide sequence portion
uggggauuucagccucucccu

SEQ ID NO: 1142 - RNA, 21 nt, Artificial Sequence
  C3-targeting RNA guide sequence portion
ugucuggaguucuuugccaag

SEQ ID NO: 1143 - RNA, 21 nt, Artificial Sequence
  C3-targeting RNA guide sequence portion
uuauaucucacgugucuggag

SEQ ID NO: 1144 - RNA, 21 nt, Artificial Sequence
  C3-targeting RNA guide sequence portion
uuaucuggagugggggaaugg

SEQ ID NO: 1145 - RNA, 21 nt, Artificial Sequence
  C3-targeting RNA guide sequence portion
uucaaguaggauggagcugag

SEQ ID NO: 1146 - RNA, 21 nt, Artificial Sequence
  C3-targeting RNA guide sequence portion
uucagccucucccucuuggca

SEQ ID NO: 1147 - RNA, 21 nt, Artificial Sequence
  C3-targeting RNA guide sequence portion
uucaguuauaucucacguguc

SEQ ID NO: 1148 - RNA, 21 nt, Artificial Sequence
  C3-targeting RNA guide sequence portion
uucccccacuccagauaaagc

SEQ ID NO: 1149 - RNA, 21 nt, Artificial Sequence
  C3-targeting RNA guide sequence portion
uucuuugccaagagggagagg

SEQ ID NO: 1150 - RNA, 21 nt, Artificial Sequence
  C3-targeting RNA guide sequence portion
uugaaaccucaccuguuccca

SEQ ID NO: 1151 - RNA, 21 nt, Artificial Sequence
  C3-targeting RNA guide sequence portion
uugccaagagggagaggcuga

SEQ ID NO: 1152 - RNA, 21 nt, Artificial Sequence
  C3-targeting RNA guide sequence portion
uuggcaaagaacuccagacac

SEQ ID NO: 1153 - RNA, 21 nt, Artificial Sequence
  C3-targeting RNA guide sequence portion
uuuaucuggagugggggaaug

SEQ ID NO: 1154 - RNA, 21 nt, Artificial Sequence
  C3-targeting RNA guide sequence portion
uuucaaguaggauggagcuga

SEQ ID NO: 1155 - RNA, 21 nt, Artificial Sequence
  C3-targeting RNA guide sequence portion
uuucagccucucccucuuggc

SEQ ID NO: 1156 - RNA, 21 nt, Artificial Sequence
  C3-targeting RNA guide sequence portion
uuugccaagagggagaggcug

SEQ ID NO: 1157 - RNA, 22 nt, Artificial Sequence
  C3-targeting RNA guide sequence portion
aaagaacuccagacacgugaga

SEQ ID NO: 1158 - RNA, 22 nt, Artificial Sequence
  C3-targeting RNA guide sequence portion
aaagcuucaguuauaucucacg

SEQ ID NO: 1159 - RNA, 22 nt, Artificial Sequence
  C3-targeting RNA guide sequence portion
aaauccccagccgccucaccug

SEQ ID NO: 1160 - RNA, 22 nt, Artificial Sequence
  C3-targeting RNA guide sequence portion
aacaggugagguuucaaguagg

SEQ ID NO: 1161 - RNA, 22 nt, Artificial Sequence
  C3-targeting RNA guide sequence portion
aacuccagacacgugagauaua

SEQ ID NO: 1162 - RNA, 22 nt, Artificial Sequence
  C3-targeting RNA guide sequence portion
aacugaagcuuuaucuggagug

SEQ ID NO: 1163 - RNA, 22 nt, Artificial Sequence
  C3-targeting RNA guide sequence portion
aagaacuccagacacgugagau

SEQ ID NO: 1164 - RNA, 22 nt, Artificial Sequence
  C3-targeting RNA guide sequence portion
aagagggagaggcugaaauccc

SEQ ID NO: 1165 - RNA, 22 nt, Artificial Sequence
  C3-targeting RNA guide sequence portion
aagcuucaguuauaucucacgu

SEQ ID NO: 1166 - RNA, 22 nt, Artificial Sequence
  C3-targeting RNA guide sequence portion
aagcuuuaucuggaguggggga

SEQ ID NO: 1167 - RNA, 22 nt, Artificial Sequence
  C3-targeting RNA guide sequence portion
aaguaggauggagcugagcugc

SEQ ID NO: 1168 - RNA, 22 nt, Artificial Sequence
  C3-targeting RNA guide sequence portion
aauccccagccgccucaccugc

SEQ ID NO: 1169 - RNA, 22 nt, Artificial Sequence
  C3-targeting RNA guide sequence portion
acacccccauucccccacucca

SEQ ID NO: 1170 - RNA, 22 nt, Artificial Sequence
  C3-targeting RNA guide sequence portion
acacgugagauauaacugaagc

SEQ ID NO: 1171 - RNA, 22 nt, Artificial Sequence
  C3-targeting RNA guide sequence portion
acaggugagguuucaaguagga

SEQ ID NO: 1172 - RNA, 22 nt, Artificial Sequence
  C3-targeting RNA guide sequence portion
acccccauucccccacuccaga

SEQ ID NO: 1173 - RNA, 22 nt, Artificial Sequence
  C3-targeting RNA guide sequence portion
accugcagcucagcuccauccu

SEQ ID NO: 1174 - RNA, 22 nt, Artificial Sequence
  C3-targeting RNA guide sequence portion
acgugagauauaacugaagcuu

SEQ ID NO: 1175 - RNA, 22 nt, Artificial Sequence
  C3-targeting RNA guide sequence portion
acgugucuggaguucuuugcca

SEQ ID NO: 1176 - RNA, 22 nt, Artificial Sequence
  C3-targeting RNA guide sequence portion
acuccagacacgugagauauaa

SEQ ID NO: 1177 - RNA, 22 nt, Artificial Sequence
  C3-targeting RNA guide sequence portion
acuccagauaaagcuucaguua

SEQ ID NO: 1178 - RNA, 22 nt, Artificial Sequence
  C3-targeting RNA guide sequence portion
acugaagcuuuaucuggagugg

SEQ ID NO: 1179 - RNA, 22 nt, Artificial Sequence
  C3-targeting RNA guide sequence portion
acuugaaaccucaccuguuccc

SEQ ID NO: 1180 - RNA, 22 nt, Artificial Sequence
  C3-targeting RNA guide sequence portion
agaacuccagacacgugagaua

SEQ ID NO: 1181 - RNA, 22 nt, Artificial Sequence
  C3-targeting RNA guide sequence portion
agacacgugagauauaacugaa

SEQ ID NO: 1182 - RNA, 22 nt, Artificial Sequence
  C3-targeting RNA guide sequence portion
agaggcugaaauccccagccgc

SEQ ID NO: 1183 - RNA, 22 nt, Artificial Sequence
  C3-targeting RNA guide sequence portion
agagggagaggcugaaaucccc

SEQ ID NO: 1184 - RNA, 22 nt, Artificial Sequence
  C3-targeting RNA guide sequence portion
agauaaagcuucaguuauaucu

SEQ ID NO: 1185 - RNA, 22 nt, Artificial Sequence
  C3-targeting RNA guide sequence portion
agauauaacugaagcuuuaucu

SEQ ID NO: 1186 - RNA, 22 nt, Artificial Sequence
  C3-targeting RNA guide sequence portion
agccgccucaccugcagcucag

SEQ ID NO: 1187 - RNA, 22 nt, Artificial Sequence
  C3-targeting RNA guide sequence portion
agccucucccucuuggcaaaga

SEQ ID NO: 1188 - RNA, 22 nt, Artificial Sequence
  C3-targeting RNA guide sequence portion
agcucagcuccauccuacuuga

SEQ ID NO: 1189 - RNA, 22 nt, Artificial Sequence
  C3-targeting RNA guide sequence portion
agcuccauccuacuugaaaccu

SEQ ID NO: 1190 - RNA, 22 nt, Artificial Sequence
  C3-targeting RNA guide sequence portion
agcugagcugcaggugaggcgg

SEQ ID NO: 1191 - RNA, 22 nt, Artificial Sequence
  C3-targeting RNA guide sequence portion
agcugcaggugaggcggcuggg

SEQ ID NO: 1192 - RNA, 22 nt, Artificial Sequence
  C3-targeting RNA guide sequence portion
agcuucaguuauaucucacgug

SEQ ID NO: 1193 - RNA, 22 nt, Artificial Sequence
  C3-targeting RNA guide sequence portion
agcuuuaucuggagugggggaa

SEQ ID NO: 1194 - RNA, 22 nt, Artificial Sequence
  C3-targeting RNA guide sequence portion
aggauggagcugagcugcaggu

SEQ ID NO: 1195 - RNA, 22 nt, Artificial Sequence
  C3-targeting RNA guide sequence portion
aggcggcuggggauuucagccu

SEQ ID NO: 1196 - RNA, 22 nt, Artificial Sequence
  C3-targeting RNA guide sequence portion
aggcugaaauccccagccgccu

SEQ ID NO: 1197 - RNA, 22 nt, Artificial Sequence
  C3-targeting RNA guide sequence portion
agggagaggcugaaauccccag

SEQ ID NO: 1198 - RNA, 22 nt, Artificial Sequence
  C3-targeting RNA guide sequence portion
aggugaggcggcuggggauuuc

SEQ ID NO: 1199 - RNA, 22 nt, Artificial Sequence
  C3-targeting RNA guide sequence portion
aggugagguuucaaguaggaug

SEQ ID NO: 1200 - RNA, 22 nt, Artificial Sequence
  C3-targeting RNA guide sequence portion
agguuucaaguaggauggagcu

SEQ ID NO: 1201 - RNA, 22 nt, Artificial Sequence
  C3-targeting RNA guide sequence portion
aguaggauggagcugagcugca

SEQ ID NO: 1202 - RNA, 22 nt, Artificial Sequence
  C3-targeting RNA guide sequence portion
aguuauaucucacgugucugga

SEQ ID NO: 1203 - RNA, 22 nt, Artificial Sequence
  C3-targeting RNA guide sequence portion
aguucuuugccaagagggagag

SEQ ID NO: 1204 - RNA, 22 nt, Artificial Sequence
  C3-targeting RNA guide sequence portion
auaaagcuucaguuauaucuca

SEQ ID NO: 1205 - RNA, 22 nt, Artificial Sequence
  C3-targeting RNA guide sequence portion
auaacugaagcuuuaucuggag

SEQ ID NO: 1206 - RNA, 22 nt, Artificial Sequence
  C3-targeting RNA guide sequence portion
auauaacugaagcuuuaucugg

SEQ ID NO: 1207 - RNA, 22 nt, Artificial Sequence
  C3-targeting RNA guide sequence portion
auaucucacgugucuggaguuc

SEQ ID NO: 1208 - RNA, 22 nt, Artificial Sequence
  C3-targeting RNA guide sequence portion
auccccagccgccucaccugca

SEQ ID NO: 1209 - RNA, 22 nt, Artificial Sequence
  C3-targeting RNA guide sequence portion
auccuacuugaaaccucaccug

SEQ ID NO: 1210 - RNA, 22 nt, Artificial Sequence
  C3-targeting RNA guide sequence portion
aucucacgugucuggaguucuu

SEQ ID NO: 1211 - RNA, 22 nt, Artificial Sequence
  C3-targeting RNA guide sequence portion
augcggugggaacaggugaggu

SEQ ID NO: 1212 - RNA, 22 nt, Artificial Sequence
  C3-targeting RNA guide sequence portion
auggagcugagcugcaggugag

SEQ ID NO: 1213 - RNA, 22 nt, Artificial Sequence
  C3-targeting RNA guide sequence portion
auucccccacuccagauaaagc

SEQ ID NO: 1214 - RNA, 22 nt, Artificial Sequence
  C3-targeting RNA guide sequence portion
auuucagccucucccucuuggc

SEQ ID NO: 1215 - RNA, 22 nt, Artificial Sequence
  C3-targeting RNA guide sequence portion
caaagaacuccagacacgugag

SEQ ID NO: 1216 - RNA, 22 nt, Artificial Sequence
  C3-targeting RNA guide sequence portion
caagagggagaggcugaaaucc

SEQ ID NO: 1217 - RNA, 22 nt, Artificial Sequence
  C3-targeting RNA guide sequence portion
caaguaggauggagcugagcug

SEQ ID NO: 1218 - RNA, 22 nt, Artificial Sequence
  C3-targeting RNA guide sequence portion
cacacccccauucccccacucc

SEQ ID NO: 1219 - RNA, 22 nt, Artificial Sequence
  C3-targeting RNA guide sequence portion
cacccccauucccccacuccag

SEQ ID NO: 1220 - RNA, 22 nt, Artificial Sequence
  C3-targeting RNA guide sequence portion
caccugcagcucagcuccaucc

SEQ ID NO: 1221 - RNA, 22 nt, Artificial Sequence
  C3-targeting RNA guide sequence portion
cacgugagauauaacugaagcu

SEQ ID NO: 1222 - RNA, 22 nt, Artificial Sequence
  C3-targeting RNA guide sequence portion
cacgugucuggaguucuuugcc

SEQ ID NO: 1223 - RNA, 22 nt, Artificial Sequence
  C3-targeting RNA guide sequence portion
cacuccagauaaagcuucaguu

SEQ ID NO: 1224 - RNA, 22 nt, Artificial Sequence
  C3-targeting RNA guide sequence portion
cagacacgugagauauaacuga

SEQ ID NO: 1225 - RNA, 22 nt, Artificial Sequence
  C3-targeting RNA guide sequence portion
cagauaaagcuucaguuauauc

SEQ ID NO: 1226 - RNA, 22 nt, Artificial Sequence
  C3-targeting RNA guide sequence portion
cagccgccucaccugcagcuca

SEQ ID NO: 1227 - RNA, 22 nt, Artificial Sequence
  C3-targeting RNA guide sequence portion
cagccucucccucuuggcaaag

SEQ ID NO: 1228 - RNA, 22 nt, Artificial Sequence
  C3-targeting RNA guide sequence portion
cagcucagcuccauccuacuug

SEQ ID NO: 1229 - RNA, 22 nt, Artificial Sequence
  C3-targeting RNA guide sequence portion
cagcuccauccuacuugaaacc

SEQ ID NO: 1230 - RNA, 22 nt, Artificial Sequence
  C3-targeting RNA guide sequence portion
caggugaggcggcuggggauuu

SEQ ID NO: 1231 - RNA, 22 nt, Artificial Sequence
  C3-targeting RNA guide sequence portion
caggugagguuucaaguaggau

SEQ ID NO: 1232 - RNA, 22 nt, Artificial Sequence
  C3-targeting RNA guide sequence portion
caguuauaucucacgugucugg

SEQ ID NO: 1233 - RNA, 22 nt, Artificial Sequence
  C3-targeting RNA guide sequence portion
cauccuacuugaaaccucaccu

SEQ ID NO: 1234 - RNA, 22 nt, Artificial Sequence
  C3-targeting RNA guide sequence portion
cauucccccacuccagauaaag

SEQ ID NO: 1235 - RNA, 22 nt, Artificial Sequence
  C3-targeting RNA guide sequence portion
ccaagagggagaggcugaaauc

SEQ ID NO: 1236 - RNA, 22 nt, Artificial Sequence
  C3-targeting RNA guide sequence portion
ccacacccccauucccccacuc

SEQ ID NO: 1237 - RNA, 22 nt, Artificial Sequence
  C3-targeting RNA guide sequence portion
ccacuccagauaaagcuucagu

SEQ ID NO: 1238 - RNA, 22 nt, Artificial Sequence
  C3-targeting RNA guide sequence portion
ccagacacgugagauauaacug

SEQ ID NO: 1239 - RNA, 22 nt, Artificial Sequence
  C3-targeting RNA guide sequence portion
ccagauaaagcuucaguuauau

SEQ ID NO: 1240 - RNA, 22 nt, Artificial Sequence
  C3-targeting RNA guide sequence portion
ccagccgccucaccugcagcuc

SEQ ID NO: 1241 - RNA, 22 nt, Artificial Sequence
  C3-targeting RNA guide sequence portion
ccauccuacuugaaaccucacc

SEQ ID NO: 1242 - RNA, 22 nt, Artificial Sequence
  C3-targeting RNA guide sequence portion
ccauucccccacuccagauaaa

SEQ ID NO: 1243 - RNA, 22 nt, Artificial Sequence
  C3-targeting RNA guide sequence portion
cccacuccagauaaagcuucag

SEQ ID NO: 1244 - RNA, 22 nt, Artificial Sequence
  C3-targeting RNA guide sequence portion
cccagccgccucaccugcagcu

SEQ ID NO: 1245 - RNA, 22 nt, Artificial Sequence
  C3-targeting RNA guide sequence portion
cccauucccccacuccagauaa

SEQ ID NO: 1246 - RNA, 22 nt, Artificial Sequence
  C3-targeting RNA guide sequence portion
ccccacuccagauaaagcuuca

SEQ ID NO: 1247 - RNA, 22 nt, Artificial Sequence
  C3-targeting RNA guide sequence portion
ccccagccgccucaccugcagc

SEQ ID NO: 1248 - RNA, 22 nt, Artificial Sequence
  C3-targeting RNA guide sequence portion
ccccauucccccacuccagaua

SEQ ID NO: 1249 - RNA, 22 nt, Artificial Sequence
  C3-targeting RNA guide sequence portion
cccccacuccagauaaagcuuc

SEQ ID NO: 1250 - RNA, 22 nt, Artificial Sequence
  C3-targeting RNA guide sequence portion
cccccauucccccacuccagau

SEQ ID NO: 1251 - RNA, 22 nt, Artificial Sequence
  C3-targeting RNA guide sequence portion
cccucuuggcaaagaacuccag

SEQ ID NO: 1252 - RNA, 22 nt, Artificial Sequence
  C3-targeting RNA guide sequence portion
ccgccucaccugcagcucagcu

SEQ ID NO: 1253 - RNA, 22 nt, Artificial Sequence
  C3-targeting RNA guide sequence portion
ccuacuugaaaccucaccuguu

SEQ ID NO: 1254 - RNA, 22 nt, Artificial Sequence
  C3-targeting RNA guide sequence portion
ccucaccugcagcucagcucca

SEQ ID NO: 1255 - RNA, 22 nt, Artificial Sequence
  C3-targeting RNA guide sequence portion
ccucucccucuuggcaaagaac

SEQ ID NO: 1256 - RNA, 22 nt, Artificial Sequence
  C3-targeting RNA guide sequence portion
ccucuuggcaaagaacuccaga

SEQ ID NO: 1257 - RNA, 22 nt, Artificial Sequence
  C3-targeting RNA guide sequence portion
ccugcagcucagcuccauccua

SEQ ID NO: 1258 - RNA, 22 nt, Artificial Sequence
  C3-targeting RNA guide sequence portion
cgccucaccugcagcucagcuc

SEQ ID NO: 1259 - RNA, 22 nt, Artificial Sequence
  C3-targeting RNA guide sequence portion
cggcuggggauuucagccucuc

SEQ ID NO: 1260 - RNA, 22 nt, Artificial Sequence
  C3-targeting RNA guide sequence portion
cggugggaacaggugagguuuc

SEQ ID NO: 1261 - RNA, 22 nt, Artificial Sequence
  C3-targeting RNA guide sequence portion
cgugagauauaacugaagcuuu

SEQ ID NO: 1262 - RNA, 22 nt, Artificial Sequence
  C3-targeting RNA guide sequence portion
cgugucuggaguucuuugccaa

SEQ ID NO: 1263 - RNA, 22 nt, Artificial Sequence
  C3-targeting RNA guide sequence portion
cuacuugaaaccucaccuguuc

SEQ ID NO: 1264 - RNA, 22 nt, Artificial Sequence
  C3-targeting RNA guide sequence portion
cucaccugcagcucagcuccau

SEQ ID NO: 1265 - RNA, 22 nt, Artificial Sequence
  C3-targeting RNA guide sequence portion
cucacgugucuggaguucuuug

SEQ ID NO: 1266 - RNA, 22 nt, Artificial Sequence
  C3-targeting RNA guide sequence portion
cucagcuccauccuacuugaaa

SEQ ID NO: 1267 - RNA, 22 nt, Artificial Sequence
  C3-targeting RNA guide sequence portion
cuccagacacgugagauauaac

SEQ ID NO: 1268 - RNA, 22 nt, Artificial Sequence
  C3-targeting RNA guide sequence portion
cuccagauaaagcuucaguuau

SEQ ID NO: 1269 - RNA, 22 nt, Artificial Sequence
  C3-targeting RNA guide sequence portion
cuccauccuacuugaaaccuca

SEQ ID NO: 1270 - RNA, 22 nt, Artificial Sequence
  C3-targeting RNA guide sequence portion
cucccucuuggcaaagaacucc

SEQ ID NO: 1271 - RNA, 22 nt, Artificial Sequence
  C3-targeting RNA guide sequence portion
cucucccucuuggcaaagaacu

SEQ ID NO: 1272 - RNA, 22 nt, Artificial Sequence
  C3-targeting RNA guide sequence portion
cucuuggcaaagaacuccagac

SEQ ID NO: 1273 - RNA, 22 nt, Artificial Sequence
  C3-targeting RNA guide sequence portion
cugaaauccccagccgccucac

SEQ ID NO: 1274 - RNA, 22 nt, Artificial Sequence
  C3-targeting RNA guide sequence portion
cugaagcuuuaucuggaguggg

SEQ ID NO: 1275 - RNA, 22 nt, Artificial Sequence
  C3-targeting RNA guide sequence portion
cugagcugcaggugaggcggcu

SEQ ID NO: 1276 - RNA, 22 nt, Artificial Sequence
  C3-targeting RNA guide sequence portion
cugcagcucagcuccauccuac

SEQ ID NO: 1277 - RNA, 22 nt, Artificial Sequence
  C3-targeting RNA guide sequence portion
cugcaggugaggcggcugggga

SEQ ID NO: 1278 - RNA, 22 nt, Artificial Sequence
  C3-targeting RNA guide sequence portion
cuggaguucuuugccaagaggg

SEQ ID NO: 1279 - RNA, 22 nt, Artificial Sequence
  C3-targeting RNA guide sequence portion
cuggggauuucagccucucccu

SEQ ID NO: 1280 - RNA, 22 nt, Artificial Sequence
  C3-targeting RNA guide sequence portion
cuucaguuauaucucacguguc

SEQ ID NO: 1281 - RNA, 22 nt, Artificial Sequence
  C3-targeting RNA guide sequence portion
cuugaaaccucaccuguuccca

SEQ ID NO: 1282 - RNA, 22 nt, Artificial Sequence
  C3-targeting RNA guide sequence portion
cuuggcaaagaacuccagacac

SEQ ID NO: 1283 - RNA, 22 nt, Artificial Sequence
  C3-targeting RNA guide sequence portion
cuuuaucuggagugggggaaug

SEQ ID NO: 1284 - RNA, 22 nt, Artificial Sequence
  C3-targeting RNA guide sequence portion
cuuugccaagagggagaggcug

SEQ ID NO: 1285 - RNA, 22 nt, Artificial Sequence
  C3-targeting RNA guide sequence portion
gaaauccccagccgccucaccu

SEQ ID NO: 1286 - RNA, 22 nt, Artificial Sequence
  C3-targeting RNA guide sequence portion
gaacaggugagguuucaaguag

SEQ ID NO: 1287 - RNA, 22 nt, Artificial Sequence
  C3-targeting RNA guide sequence portion
gaacuccagacacgugagauau

SEQ ID NO: 1288 - RNA, 22 nt, Artificial Sequence
  C3-targeting RNA guide sequence portion
gaagcuuuaucuggaguggggg

SEQ ID NO: 1289 - RNA, 22 nt, Artificial Sequence
  C3-targeting RNA guide sequence portion
gacacgugagauauaacugaag

SEQ ID NO: 1290 - RNA, 22 nt, Artificial Sequence
  C3-targeting RNA guide sequence portion
gagaggcugaaauccccagccg

SEQ ID NO: 1291 - RNA, 22 nt, Artificial Sequence
  C3-targeting RNA guide sequence portion
gagauauaacugaagcuuuauc

SEQ ID NO: 1292 - RNA, 22 nt, Artificial Sequence
  C3-targeting RNA guide sequence portion
gagcugagcugcaggugaggcg

SEQ ID NO: 1293 - RNA, 22 nt, Artificial Sequence
  C3-targeting RNA guide sequence portion
gagcugcaggugaggcggcugg

SEQ ID NO: 1294 - RNA, 22 nt, Artificial Sequence
  C3-targeting RNA guide sequence portion
gaggcggcuggggauuucagcc

SEQ ID NO: 1295 - RNA, 22 nt, Artificial Sequence
  C3-targeting RNA guide sequence portion
gaggcugaaauccccagccgcc

SEQ ID NO: 1296 - RNA, 22 nt, Artificial Sequence
  C3-targeting RNA guide sequence portion
gagggagaggcugaaaucccca

SEQ ID NO: 1297 - RNA, 22 nt, Artificial Sequence
  C3-targeting RNA guide sequence portion
gagguuucaaguaggauggagc

SEQ ID NO: 1298 - RNA, 22 nt, Artificial Sequence
  C3-targeting RNA guide sequence portion
gaguucuuugccaagagggaga

SEQ ID NO: 1299 - RNA, 22 nt, Artificial Sequence
  C3-targeting RNA guide sequence portion
gauaaagcuucaguuauaucuc

SEQ ID NO: 1300 - RNA, 22 nt, Artificial Sequence
  C3-targeting RNA guide sequence portion
gauauaacugaagcuuuaucug

SEQ ID NO: 1301 - RNA, 22 nt, Artificial Sequence
  C3-targeting RNA guide sequence portion
gauggagcugagcugcagguga

SEQ ID NO: 1302 - RNA, 22 nt, Artificial Sequence
  C3-targeting RNA guide sequence portion
gauuucagccucucccucuugg

SEQ ID NO: 1303 - RNA, 22 nt, Artificial Sequence
  C3-targeting RNA guide sequence portion
gcaaagaacuccagacacguga

SEQ ID NO: 1304 - RNA, 22 nt, Artificial Sequence
  C3-targeting RNA guide sequence portion
gcagcucagcuccauccuacuu

SEQ ID NO: 1305 - RNA, 22 nt, Artificial Sequence
  C3-targeting RNA guide sequence portion
gcaggugaggcggcuggggauu

SEQ ID NO: 1306 - RNA, 22 nt, Artificial Sequence
  C3-targeting RNA guide sequence portion
gccaagagggagaggcugaaau

SEQ ID NO: 1307 - RNA, 22 nt, Artificial Sequence
  C3-targeting RNA guide sequence portion
gccgccucaccugcagcucagc

SEQ ID NO: 1308 - RNA, 22 nt, Artificial Sequence
  C3-targeting RNA guide sequence portion
gccucaccugcagcucagcucc

SEQ ID NO: 1309 - RNA, 22 nt, Artificial Sequence
  C3-targeting RNA guide sequence portion
gccucucccucuuggcaaagaa

SEQ ID NO: 1310 - RNA, 22 nt, Artificial Sequence
  C3-targeting RNA guide sequence portion
gcggcuggggauuucagccucu

SEQ ID NO: 1311 - RNA, 22 nt, Artificial Sequence
  C3-targeting RNA guide sequence portion
gcggugggaacaggugagguuu

SEQ ID NO: 1312 - RNA, 22 nt, Artificial Sequence
  C3-targeting RNA guide sequence portion
gcucagcuccauccuacuugaa

SEQ ID NO: 1313 - RNA, 22 nt, Artificial Sequence
  C3-targeting RNA guide sequence portion
gcuccauccuacuugaaaccuc

SEQ ID NO: 1314 - RNA, 22 nt, Artificial Sequence
  C3-targeting RNA guide sequence portion
gcugaaauccccagccgccuca

SEQ ID NO: 1315 - RNA, 22 nt, Artificial Sequence
  C3-targeting RNA guide sequence portion
gcugagcugcaggugaggcggc

SEQ ID NO: 1316 - RNA, 22 nt, Artificial Sequence
  C3-targeting RNA guide sequence portion
gcugcaggugaggcggcugggg

SEQ ID NO: 1317 - RNA, 22 nt, Artificial Sequence
  C3-targeting RNA guide sequence portion
gcuggggauuucagccucuccc

SEQ ID NO: 1318 - RNA, 22 nt, Artificial Sequence
  C3-targeting RNA guide sequence portion
gcuucaguuauaucucacgugu

SEQ ID NO: 1319 - RNA, 22 nt, Artificial Sequence
  C3-targeting RNA guide sequence portion
gcuuuaucuggagugggggaau

SEQ ID NO: 1320 - RNA, 22 nt, Artificial Sequence
  C3-targeting RNA guide sequence portion
ggaacaggugagguuucaagua

SEQ ID NO: 1321 - RNA, 22 nt, Artificial Sequence
  C3-targeting RNA guide sequence portion
ggagaggcugaaauccccagcc

SEQ ID NO: 1322 - RNA, 22 nt, Artificial Sequence
  C3-targeting RNA guide sequence portion
ggagcugagcugcaggugaggc

SEQ ID NO: 1323 - RNA, 22 nt, Artificial Sequence
  C3-targeting RNA guide sequence portion
ggaguucuuugccaagagggag

SEQ ID NO: 1324 - RNA, 22 nt, Artificial Sequence
  C3-targeting RNA guide sequence portion
ggauggagcugagcugcaggug

SEQ ID NO: 1325 - RNA, 22 nt, Artificial Sequence
  C3-targeting RNA guide sequence portion
ggauuucagccucucccucuug

SEQ ID NO: 1326 - RNA, 22 nt, Artificial Sequence
  C3-targeting RNA guide sequence portion
ggcaaagaacuccagacacgug

SEQ ID NO: 1327 - RNA, 22 nt, Artificial Sequence
  C3-targeting RNA guide sequence portion
ggcggcuggggauuucagccuc

SEQ ID NO: 1328 - RNA, 22 nt, Artificial Sequence
  C3-targeting RNA guide sequence portion
ggcugaaauccccagccgccuc

SEQ ID NO: 1329 - RNA, 22 nt, Artificial Sequence
  C3-targeting RNA guide sequence portion
ggcuggggauuucagccucucc

SEQ ID NO: 1330 - RNA, 22 nt, Artificial Sequence
  C3-targeting RNA guide sequence portion
gggaacaggugagguuucaagu

SEQ ID NO: 1331 - RNA, 22 nt, Artificial Sequence
  C3-targeting RNA guide sequence portion
gggagaggcugaaauccccagc

SEQ ID NO: 1332 - RNA, 22 nt, Artificial Sequence
  C3-targeting RNA guide sequence portion
gggauuucagccucucccucuu

SEQ ID NO: 1333 - RNA, 22 nt, Artificial Sequence
  C3-targeting RNA guide sequence portion
ggggauuucagccucucccucu

SEQ ID NO: 1334 - RNA, 22 nt, Artificial Sequence
  C3-targeting RNA guide sequence portion
ggugaggcggcuggggauuuca

SEQ ID NO: 1335 - RNA, 22 nt, Artificial Sequence
  C3-targeting RNA guide sequence portion
ggugagguuucaaguaggaugg

SEQ ID NO: 1336 - RNA, 22 nt, Artificial Sequence
  C3-targeting RNA guide sequence portion
ggugggaacaggugagguuuca

SEQ ID NO: 1337 - RNA, 22 nt, Artificial Sequence
  C3-targeting RNA guide sequence portion
gguuucaaguaggauggagcug

SEQ ID NO: 1338 - RNA, 22 nt, Artificial Sequence
  C3-targeting RNA guide sequence portion
guaggauggagcugagcugcag

SEQ ID NO: 1339 - RNA, 22 nt, Artificial Sequence
  C3-targeting RNA guide sequence portion
gucuggaguucuuugccaagag

SEQ ID NO: 1340 - RNA, 22 nt, Artificial Sequence
  C3-targeting RNA guide sequence portion
gugagauauaacugaagcuuua

SEQ ID NO: 1341 - RNA, 22 nt, Artificial Sequence
  C3-targeting RNA guide sequence portion
gugaggcggcuggggauuucag

SEQ ID NO: 1342 - RNA, 22 nt, Artificial Sequence
  C3-targeting RNA guide sequence portion
gugagguuucaaguaggaugga

SEQ ID NO: 1343 - RNA, 22 nt, Artificial Sequence
  C3-targeting RNA guide sequence portion
gugggaacaggugagguuucaa

SEQ ID NO: 1344 - RNA, 22 nt, Artificial Sequence
  C3-targeting RNA guide sequence portion
gugucuggaguucuuugccaag

SEQ ID NO: 1345 - RNA, 22 nt, Artificial Sequence
  C3-targeting RNA guide sequence portion
guuauaucucacgugucuggag

SEQ ID NO: 1346 - RNA, 22 nt, Artificial Sequence
  C3-targeting RNA guide sequence portion
guucuuugccaagagggagagg

SEQ ID NO: 1347 - RNA, 22 nt, Artificial Sequence
  C3-targeting RNA guide sequence portion
guuucaaguaggauggagcuga

SEQ ID NO: 1348 - RNA, 22 nt, Artificial Sequence
  C3-targeting RNA guide sequence portion
uaaagcuucaguuauaucucac

SEQ ID NO: 1349 - RNA, 22 nt, Artificial Sequence
  C3-targeting RNA guide sequence portion
uaacugaagcuuuaucuggagu

SEQ ID NO: 1350 - RNA, 22 nt, Artificial Sequence
  C3-targeting RNA guide sequence portion
uacuugaaaccucaccuguucc

SEQ ID NO: 1351 - RNA, 22 nt, Artificial Sequence
  C3-targeting RNA guide sequence portion
uaggauggagcugagcugcagg

SEQ ID NO: 1352 - RNA, 22 nt, Artificial Sequence
  C3-targeting RNA guide sequence portion
uauaacugaagcuuuaucugga

SEQ ID NO: 1353 - RNA, 22 nt, Artificial Sequence
  C3-targeting RNA guide sequence portion
uauaucucacgugucuggaguu

SEQ ID NO: 1354 - RNA, 22 nt, Artificial Sequence
  C3-targeting RNA guide sequence portion
uaucucacgugucuggaguucu

SEQ ID NO: 1355 - RNA, 22 nt, Artificial Sequence
  C3-targeting RNA guide sequence portion
uaucuggagugggggaaugggg

SEQ ID NO: 1356 - RNA, 22 nt, Artificial Sequence
  C3-targeting RNA guide sequence portion
ucaaguaggauggagcugagcu

SEQ ID NO: 1357 - RNA, 22 nt, Artificial Sequence
  C3-targeting RNA guide sequence portion
ucaccugcagcucagcuccauc

SEQ ID NO: 1358 - RNA, 22 nt, Artificial Sequence
  C3-targeting RNA guide sequence portion
ucacgugucuggaguucuuugc

SEQ ID NO: 1359 - RNA, 22 nt, Artificial Sequence
  C3-targeting RNA guide sequence portion
ucagccucucccucuuggcaaa

SEQ ID NO: 1360 - RNA, 22 nt, Artificial Sequence
  C3-targeting RNA guide sequence portion
ucagcuccauccuacuugaaac

SEQ ID NO: 1361 - RNA, 22 nt, Artificial Sequence
  C3-targeting RNA guide sequence portion
ucaguuauaucucacgugucug

SEQ ID NO: 1362 - RNA, 22 nt, Artificial Sequence
  C3-targeting RNA guide sequence portion
uccagacacgugagauauaacu

SEQ ID NO: 1363 - RNA, 22 nt, Artificial Sequence
  C3-targeting RNA guide sequence portion
uccagauaaagcuucaguuaua

SEQ ID NO: 1364 - RNA, 22 nt, Artificial Sequence
  C3-targeting RNA guide sequence portion
uccauccuacuugaaaccucac

SEQ ID NO: 1365 - RNA, 22 nt, Artificial Sequence
  C3-targeting RNA guide sequence portion
uccccagccgccucaccugcag

SEQ ID NO: 1366 - RNA, 22 nt, Artificial Sequence
  C3-targeting RNA guide sequence portion
ucccccacuccagauaaagcuu

SEQ ID NO: 1367 - RNA, 22 nt, Artificial Sequence
  C3-targeting RNA guide sequence portion
ucccucuuggcaaagaacucca

SEQ ID NO: 1368 - RNA, 22 nt, Artificial Sequence
  C3-targeting RNA guide sequence portion
uccuacuugaaaccucaccugu

SEQ ID NO: 1369 - RNA, 22 nt, Artificial Sequence
  C3-targeting RNA guide sequence portion
ucucacgugucuggaguucuuu

SEQ ID NO: 1370 - RNA, 22 nt, Artificial Sequence
  C3-targeting RNA guide sequence portion
ucucccucuuggcaaagaacuc

SEQ ID NO: 1371 - RNA, 22 nt, Artificial Sequence
  C3-targeting RNA guide sequence portion
ucuggaguucuuugccaagagg

SEQ ID NO: 1372 - RNA, 22 nt, Artificial Sequence
  C3-targeting RNA guide sequence portion
ucuuggcaaagaacuccagaca

SEQ ID NO: 1373 - RNA, 22 nt, Artificial Sequence
  C3-targeting RNA guide sequence portion
ucuuugccaagagggagaggcu

SEQ ID NO: 1374 - RNA, 22 nt, Artificial Sequence
  C3-targeting RNA guide sequence portion
ugaaauccccagccgccucacc

SEQ ID NO: 1375 - RNA, 22 nt, Artificial Sequence
  C3-targeting RNA guide sequence portion
ugaagcuuuaucuggagugggg

SEQ ID NO: 1376 - RNA, 22 nt, Artificial Sequence
  C3-targeting RNA guide sequence portion
ugagauauaacugaagcuuuau

SEQ ID NO: 1377 - RNA, 22 nt, Artificial Sequence
  C3-targeting RNA guide sequence portion
ugagcugcaggugaggcggcug

SEQ ID NO: 1378 - RNA, 22 nt, Artificial Sequence
  C3-targeting RNA guide sequence portion
ugaggcggcuggggauuucagc

SEQ ID NO: 1379 - RNA, 22 nt, Artificial Sequence
  C3-targeting RNA guide sequence portion
ugagguuucaaguaggauggag

SEQ ID NO: 1380 - RNA, 22 nt, Artificial Sequence
  C3-targeting RNA guide sequence portion
ugcagcucagcuccauccuacu

SEQ ID NO: 1381 - RNA, 22 nt, Artificial Sequence
  C3-targeting RNA guide sequence portion
ugcaggugaggcggcuggggau

SEQ ID NO: 1382 - RNA, 22 nt, Artificial Sequence
  C3-targeting RNA guide sequence portion
ugccaagagggagaggcugaaa

SEQ ID NO: 1383 - RNA, 22 nt, Artificial Sequence
  C3-targeting RNA guide sequence portion
ugcggugggaacaggugagguu

SEQ ID NO: 1384 - RNA, 22 nt, Artificial Sequence
  C3-targeting RNA guide sequence portion
uggagcugagcugcaggugagg

SEQ ID NO: 1385 - RNA, 22 nt, Artificial Sequence
  C3-targeting RNA guide sequence portion
uggaguucuuugccaagaggga

SEQ ID NO: 1386 - RNA, 22 nt, Artificial Sequence
  C3-targeting RNA guide sequence portion
uggcaaagaacuccagacacgu

SEQ ID NO: 1387 - RNA, 22 nt, Artificial Sequence
  C3-targeting RNA guide sequence portion
ugggaacaggugagguuucaag

SEQ ID NO: 1388 - RNA, 22 nt, Artificial Sequence
  C3-targeting RNA guide sequence portion
uggggauuucagccucucccuc

SEQ ID NO: 1389 - RNA, 22 nt, Artificial Sequence
  C3-targeting RNA guide sequence portion
ugucuggaguucuuugccaaga

SEQ ID NO: 1390 - RNA, 22 nt, Artificial Sequence
  C3-targeting RNA guide sequence portion
uuauaucucacgugucuggagu

SEQ ID NO: 1391 - RNA, 22 nt, Artificial Sequence
  C3-targeting RNA guide sequence portion
uuaucuggagugggggaauggg

SEQ ID NO: 1392 - RNA, 22 nt, Artificial Sequence
  C3-targeting RNA guide sequence portion
uucaaguaggauggagcugagc

SEQ ID NO: 1393 - RNA, 22 nt, Artificial Sequence
  C3-targeting RNA guide sequence portion
uucagccucucccucuuggcaa

SEQ ID NO: 1394 - RNA, 22 nt, Artificial Sequence
  C3-targeting RNA guide sequence portion
uucaguuauaucucacgugucu

SEQ ID NO: 1395 - RNA, 22 nt, Artificial Sequence
  C3-targeting RNA guide sequence portion
uucccccacuccagauaaagcu

SEQ ID NO: 1396 - RNA, 22 nt, Artificial Sequence
  C3-targeting RNA guide sequence portion
uucuuugccaagagggagaggc

SEQ ID NO: 1397 - RNA, 22 nt, Artificial Sequence
  C3-targeting RNA guide sequence portion
uugccaagagggagaggcugaa

SEQ ID NO: 1398 - RNA, 22 nt, Artificial Sequence
  C3-targeting RNA guide sequence portion
uuggcaaagaacuccagacacg

SEQ ID NO: 1399 - RNA, 22 nt, Artificial Sequence
  C3-targeting RNA guide sequence portion
uuuaucuggagugggggaaugg

SEQ ID NO: 1400 - RNA, 22 nt, Artificial Sequence
  C3-targeting RNA guide sequence portion
uuucaaguaggauggagcugag

SEQ ID NO: 1401 - RNA, 22 nt, Artificial Sequence
  C3-targeting RNA guide sequence portion
uuucagccucucccucuuggca

SEQ ID NO: 1402 - RNA, 22 nt, Artificial Sequence
  C3-targeting RNA guide sequence portion
uuugccaagagggagaggcuga

SEQ ID NO: 1403 - RNA, 20 nt, Artificial Sequence
  C3-targeting RNA guide sequence portion
aaaaccucuaaaccucaaau

SEQ ID NO: 1404 - RNA, 20 nt, Artificial Sequence
  C3-targeting RNA guide sequence portion
aaaauugcaaguccccaagc

SEQ ID NO: 1405 - RNA, 20 nt, Artificial Sequence
  C3-targeting RNA guide sequence portion
aaacacccaaacucucaggc

SEQ ID NO: 1406 - RNA, 20 nt, Artificial Sequence
  C3-targeting RNA guide sequence portion
aaacacccaaaugcacccug

SEQ ID NO: 1407 - RNA, 20 nt, Artificial Sequence
  C3-targeting RNA guide sequence portion
aaacacccaacccauaaaca

SEQ ID NO: 1408 - RNA, 20 nt, Artificial Sequence
  C3-targeting RNA guide sequence portion
aaacacucaaacucccggac

SEQ ID NO: 1409 - RNA, 20 nt, Artificial Sequence
  C3-targeting RNA guide sequence portion
aaacacuccaaauauguaaa

SEQ ID NO: 1410 - RNA, 20 nt, Artificial Sequence
  C3-targeting RNA guide sequence portion
aaacagggcugguucugggg

SEQ ID NO: 1411 - RNA, 20 nt, Artificial Sequence
  C3-targeting RNA guide sequence portion
aaacaucccaaacuccaauu

SEQ ID NO: 1412 - RNA, 20 nt, Artificial Sequence
  C3-targeting RNA guide sequence portion
aaaccaacagaugaccucaa

SEQ ID NO: 1413 - RNA, 20 nt, Artificial Sequence
  C3-targeting RNA guide sequence portion
aaacccacacaugccccaaa

SEQ ID NO: 1414 - RNA, 20 nt, Artificial Sequence
  C3-targeting RNA guide sequence portion
aaacccacacugaaaauugc

SEQ ID NO: 1415 - RNA, 20 nt, Artificial Sequence
  C3-targeting RNA guide sequence portion
aaacccacauacgccaaaac

SEQ ID NO: 1416 - RNA, 20 nt, Artificial Sequence
  C3-targeting RNA guide sequence portion
aaacccagccuaaaccucca

SEQ ID NO: 1417 - RNA, 20 nt, Artificial Sequence
  C3-targeting RNA guide sequence portion
aaacccuaaaccucuaccuc

SEQ ID NO: 1418 - RNA, 20 nt, Artificial Sequence
  C3-targeting RNA guide sequence portion
aaacccugaaccuuccaacc

SEQ ID NO: 1419 - RNA, 20 nt, Artificial Sequence
  C3-targeting RNA guide sequence portion
aaaccucaaaucuuagagca

SEQ ID NO: 1420 - RNA, 20 nt, Artificial Sequence
  C3-targeting RNA guide sequence portion
aaaccuccaacaccccaguc

SEQ ID NO: 1421 - RNA, 20 nt, Artificial Sequence
  C3-targeting RNA guide sequence portion
aaaccucuaaaccucaaauc

SEQ ID NO: 1422 - RNA, 20 nt, Artificial Sequence
  C3-targeting RNA guide sequence portion
aaaccucuaccucucuaaac

SEQ ID NO: 1423 - RNA, 20 nt, Artificial Sequence
  C3-targeting RNA guide sequence portion
aaacucacaggcagcccaaa

SEQ ID NO: 1424 - RNA, 20 nt, Artificial Sequence
  C3-targeting RNA guide sequence portion
aaacuccaauuccaccauac

SEQ ID NO: 1425 - RNA, 20 nt, Artificial Sequence
  C3-targeting RNA guide sequence portion
aaacuccaauuccacgauac

SEQ ID NO: 1426 - RNA, 20 nt, Artificial Sequence
  C3-targeting RNA guide sequence portion
aaacuccaauuccaugauac

SEQ ID NO: 1427 - RNA, 20 nt, Artificial Sequence
  C3-targeting RNA guide sequence portion
aaacucccaaaucuuguaaa

SEQ ID NO: 1428 - RNA, 20 nt, Artificial Sequence
  C3-targeting RNA guide sequence portion
aaacucccggacacccucaa

SEQ ID NO: 1429 - RNA, 20 nt, Artificial Sequence
  C3-targeting RNA guide sequence portion
aaacucucaggcagcccaaa

SEQ ID NO: 1430 - RNA, 20 nt, Artificial Sequence
  C3-targeting RNA guide sequence portion
aaagauuggcuacuucgggu

SEQ ID NO: 1431 - RNA, 20 nt, Artificial Sequence
  C3-targeting RNA guide sequence portion
aaagccugggcaacgagggg

SEQ ID NO: 1432 - RNA, 20 nt, Artificial Sequence
  C3-targeting RNA guide sequence portion
aaaggccaggcccagcuggc

SEQ ID NO: 1433 - RNA, 20 nt, Artificial Sequence
  C3-targeting RNA guide sequence portion
aaauacaaucaauuccaaau

SEQ ID NO: 1434 - RNA, 20 nt, Artificial Sequence
  C3-targeting RNA guide sequence portion
aaauauguaaacacucaaac

SEQ ID NO: 1435 - RNA, 20 nt, Artificial Sequence
  C3-targeting RNA guide sequence portion
aaaucuuagagcaccccaaa

SEQ ID NO: 1436 - RNA, 20 nt, Artificial Sequence
  C3-targeting RNA guide sequence portion
aaaucuuguaaaguccaaac

SEQ ID NO: 1437 - RNA, 20 nt, Artificial Sequence
  C3-targeting RNA guide sequence portion
aaaugcacccugaauucuac

SEQ ID NO: 1438 - RNA, 20 nt, Artificial Sequence
  C3-targeting RNA guide sequence portion
aaaugccccaacuauacaug

SEQ ID NO: 1439 - RNA, 20 nt, Artificial Sequence
  C3-targeting RNA guide sequence portion
aaauguauauaaacuccaau

SEQ ID NO: 1440 - RNA, 20 nt, Artificial Sequence
  C3-targeting RNA guide sequence portion
aaaugucugcuuccacccca

SEQ ID NO: 1441 - RNA, 20 nt, Artificial Sequence
  C3-targeting RNA guide sequence portion
aaauugcaaguccccaagcu

SEQ ID NO: 1442 - RNA, 20 nt, Artificial Sequence
  C3-targeting RNA guide sequence portion
aacaccacauacacccuaaa

SEQ ID NO: 1443 - RNA, 20 nt, Artificial Sequence
  C3-targeting RNA guide sequence portion
aacacccaaacucucaggca

SEQ ID NO: 1444 - RNA, 20 nt, Artificial Sequence
  C3-targeting RNA guide sequence portion
aacacccaaaugcacccuga

SEQ ID NO: 1445 - RNA, 20 nt, Artificial Sequence
  C3-targeting RNA guide sequence portion
aacacccaacccauaaacac

SEQ ID NO: 1446 - RNA, 20 nt, Artificial Sequence
  C3-targeting RNA guide sequence portion
aacaccccaguccuaauaaa

SEQ ID NO: 1447 - RNA, 20 nt, Artificial Sequence
  C3-targeting RNA guide sequence portion
aacacucaaacucccggaca

SEQ ID NO: 1448 - RNA, 20 nt, Artificial Sequence
  C3-targeting RNA guide sequence portion
aacacuccaaauauguaaac

SEQ ID NO: 1449 - RNA, 20 nt, Artificial Sequence
  C3-targeting RNA guide sequence portion
aacagaugaccucaauucua

SEQ ID NO: 1450 - RNA, 20 nt, Artificial Sequence
  C3-targeting RNA guide sequence portion
aacagggcugguucuggggu

SEQ ID NO: 1451 - RNA, 20 nt, Artificial Sequence
  C3-targeting RNA guide sequence portion
aacaucccaaacuccaauuc

SEQ ID NO: 1452 - RNA, 20 nt, Artificial Sequence
  C3-targeting RNA guide sequence portion
aaccaacagaugaccucaau

SEQ ID NO: 1453 - RNA, 20 nt, Artificial Sequence
  C3-targeting RNA guide sequence portion
aaccacaugggcaggacagc

SEQ ID NO: 1454 - RNA, 20 nt, Artificial Sequence
  C3-targeting RNA guide sequence portion
aaccagcccuguuugugggu

SEQ ID NO: 1455 - RNA, 20 nt, Artificial Sequence
  C3-targeting RNA guide sequence portion
aaccagcgucagcaacuccu

SEQ ID NO: 1456 - RNA, 20 nt, Artificial Sequence
  C3-targeting RNA guide sequence portion
aacccacacaugccccaaac

SEQ ID NO: 1457 - RNA, 20 nt, Artificial Sequence
  C3-targeting RNA guide sequence portion
aacccacacugaaaauugca

SEQ ID NO: 1458 - RNA, 20 nt, Artificial Sequence
  C3-targeting RNA guide sequence portion
aacccacauacgccaaaacc

SEQ ID NO: 1459 - RNA, 20 nt, Artificial Sequence
  C3-targeting RNA guide sequence portion
aacccagccuaaaccuccaa

SEQ ID NO: 1460 - RNA, 20 nt, Artificial Sequence
  C3-targeting RNA guide sequence portion
aacccauaaacacccaaacu

SEQ ID NO: 1461 - RNA, 20 nt, Artificial Sequence
  C3-targeting RNA guide sequence portion
aaccccugaauccacaaaca

SEQ ID NO: 1462 - RNA, 20 nt, Artificial Sequence
  C3-targeting RNA guide sequence portion
aacccgaaguagccaaucuu

SEQ ID NO: 1463 - RNA, 20 nt, Artificial Sequence
  C3-targeting RNA guide sequence portion
aacccuaaaccucuaccucu

SEQ ID NO: 1464 - RNA, 20 nt, Artificial Sequence
  C3-targeting RNA guide sequence portion
aacccugaaccuuccaacca

SEQ ID NO: 1465 - RNA, 20 nt, Artificial Sequence
  C3-targeting RNA guide sequence portion
aaccgcaccaucaaugaaca

SEQ ID NO: 1466 - RNA, 20 nt, Artificial Sequence
  C3-targeting RNA guide sequence portion
aaccucaaaucuuagagcac

SEQ ID NO: 1467 - RNA, 20 nt, Artificial Sequence
  C3-targeting RNA guide sequence portion
aaccuccaacaccccagucc

SEQ ID NO: 1468 - RNA, 20 nt, Artificial Sequence
  C3-targeting RNA guide sequence portion
aaccucuaaaccucaaaucu

SEQ ID NO: 1469 - RNA, 20 nt, Artificial Sequence
  C3-targeting RNA guide sequence portion
aaccucuaccucucuaaaca

SEQ ID NO: 1470 - RNA, 20 nt, Artificial Sequence
  C3-targeting RNA guide sequence portion
aaccugcuaaccccugaauc

SEQ ID NO: 1471 - RNA, 20 nt, Artificial Sequence
  C3-targeting RNA guide sequence portion
aaccuuccaaccagcgucag

SEQ ID NO: 1472 - RNA, 20 nt, Artificial Sequence
  C3-targeting RNA guide sequence portion
aacgagggggccacacaucc

SEQ ID NO: 1473 - RNA, 20 nt, Artificial Sequence
  C3-targeting RNA guide sequence portion
aacuauacaugaacccgaag

SEQ ID NO: 1474 - RNA, 20 nt, Artificial Sequence
  C3-targeting RNA guide sequence portion
aacucacaggcagcccaaau

SEQ ID NO: 1475 - RNA, 20 nt, Artificial Sequence
  C3-targeting RNA guide sequence portion
aacuccaauuccaccauacc

SEQ ID NO: 1476 - RNA, 20 nt, Artificial Sequence
  C3-targeting RNA guide sequence portion
aacuccaauuccacgauacc

SEQ ID NO: 1477 - RNA, 20 nt, Artificial Sequence
  C3-targeting RNA guide sequence portion
aacuccaauuccaugauacc

SEQ ID NO: 1478 - RNA, 20 nt, Artificial Sequence
  C3-targeting RNA guide sequence portion
aacucccaaaucuuguaaag

SEQ ID NO: 1479 - RNA, 20 nt, Artificial Sequence
  C3-targeting RNA guide sequence portion
aacucccggacacccucaac

SEQ ID NO: 1480 - RNA, 20 nt, Artificial Sequence
  C3-targeting RNA guide sequence portion
aacuccuccaagucucugga

SEQ ID NO: 1481 - RNA, 20 nt, Artificial Sequence
  C3-targeting RNA guide sequence portion
aacucuaccuacccaaaccc

SEQ ID NO: 1482 - RNA, 20 nt, Artificial Sequence
  C3-targeting RNA guide sequence portion
aacucucaggcagcccaaau

SEQ ID NO: 1483 - RNA, 20 nt, Artificial Sequence
  C3-targeting RNA guide sequence portion
aagauaauggcauuggcaag

SEQ ID NO: 1484 - RNA, 20 nt, Artificial Sequence
  C3-targeting RNA guide sequence portion
aagauuggcuacuucggguu

SEQ ID NO: 1485 - RNA, 20 nt, Artificial Sequence
  C3-targeting RNA guide sequence portion
aagauuugagguuuagaggu

SEQ ID NO: 1486 - RNA, 20 nt, Artificial Sequence
  C3-targeting RNA guide sequence portion
aagauuugggaguuugcagc

SEQ ID NO: 1487 - RNA, 20 nt, Artificial Sequence
  C3-targeting RNA guide sequence portion
aagcagacauuugggggucc

SEQ ID NO: 1488 - RNA, 20 nt, Artificial Sequence
  C3-targeting RNA guide sequence portion
aagcccacucccgugcccca

SEQ ID NO: 1489 - RNA, 20 nt, Artificial Sequence
  C3-targeting RNA guide sequence portion
aagccugggcaacgaggggg

SEQ ID NO: 1490 - RNA, 20 nt, Artificial Sequence
  C3-targeting RNA guide sequence portion
aagcugcaaacucccaaauc

SEQ ID NO: 1491 - RNA, 20 nt, Artificial Sequence
  C3-targeting RNA guide sequence portion
aaggccaggcccagcuggcu

SEQ ID NO: 1492 - RNA, 20 nt, Artificial Sequence
  C3-targeting RNA guide sequence portion
aagguucaggguuugguggg

SEQ ID NO: 1493 - RNA, 20 nt, Artificial Sequence
  C3-targeting RNA guide sequence portion
aaguagccaaucuuuaaacc

SEQ ID NO: 1494 - RNA, 20 nt, Artificial Sequence
  C3-targeting RNA guide sequence portion
aaguccagagacuuggagga

SEQ ID NO: 1495 - RNA, 20 nt, Artificial Sequence
  C3-targeting RNA guide sequence portion
aaguccccaagcugcaaacu

SEQ ID NO: 1496 - RNA, 20 nt, Artificial Sequence
  C3-targeting RNA guide sequence portion
aagucucuggacuuccagac

SEQ ID NO: 1497 - RNA, 20 nt, Artificial Sequence
  C3-targeting RNA guide sequence portion
aagugcgccggcagucacug

SEQ ID NO: 1498 - RNA, 20 nt, Artificial Sequence
  C3-targeting RNA guide sequence portion
aauacaaucaauuccaaaug

SEQ ID NO: 1499 - RNA, 20 nt, Artificial Sequence
  C3-targeting RNA guide sequence portion
aauauauauaaucauuccca

SEQ ID NO: 1500 - RNA, 20 nt, Artificial Sequence
  C3-targeting RNA guide sequence portion
aauauguaaacacucaaacu

SEQ ID NO: 1501 - RNA, 20 nt, Artificial Sequence
  C3-targeting RNA guide sequence portion
aaucaauuccaaaugcccca

SEQ ID NO: 1502 - RNA, 20 nt, Artificial Sequence
  C3-targeting RNA guide sequence portion
aaucauucccaaccugcuaa

SEQ ID NO: 1503 - RNA, 20 nt, Artificial Sequence
  C3-targeting RNA guide sequence portion
aauccacaaacacccaaaug

SEQ ID NO: 1504 - RNA, 20 nt, Artificial Sequence
  C3-targeting RNA guide sequence portion
aauccagguaucauggaauu

SEQ ID NO: 1505 - RNA, 20 nt, Artificial Sequence
  C3-targeting RNA guide sequence portion
aauccagguaucguggaauu

SEQ ID NO: 1506 - RNA, 20 nt, Artificial Sequence
  C3-targeting RNA guide sequence portion
aauccagguaugguggaauu

SEQ ID NO: 1507 - RNA, 20 nt, Artificial Sequence
  C3-targeting RNA guide sequence portion
aaucgccuaaacccacacau

SEQ ID NO: 1508 - RNA, 20 nt, Artificial Sequence
  C3-targeting RNA guide sequence portion
aaucuuagagcaccccaaac

SEQ ID NO: 1509 - RNA, 20 nt, Artificial Sequence
  C3-targeting RNA guide sequence portion
aaucuuguaaaguccaaacc

SEQ ID NO: 1510 - RNA, 20 nt, Artificial Sequence
  C3-targeting RNA guide sequence portion
aaucuuuaaacccacacuga

SEQ ID NO: 1511 - RNA, 20 nt, Artificial Sequence
  C3-targeting RNA guide sequence portion
aaugaacaccacauacaccc

SEQ ID NO: 1512 - RNA, 20 nt, Artificial Sequence
  C3-targeting RNA guide sequence portion
aaugacaagcccacucccgu

SEQ ID NO: 1513 - RNA, 20 nt, Artificial Sequence
  C3-targeting RNA guide sequence portion
aaugauuauauauauuuggg

SEQ ID NO: 1514 - RNA, 20 nt, Artificial Sequence
  C3-targeting RNA guide sequence portion
aaugcacccugaauucuaca

SEQ ID NO: 1515 - RNA, 20 nt, Artificial Sequence
  C3-targeting RNA guide sequence portion
aaugccauuaucuucucugg

SEQ ID NO: 1516 - RNA, 20 nt, Artificial Sequence
  C3-targeting RNA guide sequence portion
aaugccccaacuauacauga

SEQ ID NO: 1517 - RNA, 20 nt, Artificial Sequence
  C3-targeting RNA guide sequence portion
aauggcauuggcaagugcgc

SEQ ID NO: 1518 - RNA, 20 nt, Artificial Sequence
  C3-targeting RNA guide sequence portion
aauguauauaaacuccaauu

SEQ ID NO: 1519 - RNA, 20 nt, Artificial Sequence
  C3-targeting RNA guide sequence portion
aaugucugcuuccaccccag

SEQ ID NO: 1520 - RNA, 20 nt, Artificial Sequence
  C3-targeting RNA guide sequence portion
aauucagggugcauuugggu

SEQ ID NO: 1521 - RNA, 20 nt, Artificial Sequence
  C3-targeting RNA guide sequence portion
aauuccaaaugccccaacua

SEQ ID NO: 1522 - RNA, 20 nt, Artificial Sequence
  C3-targeting RNA guide sequence portion
aauuccaccauaccuggauu

SEQ ID NO: 1523 - RNA, 20 nt, Artificial Sequence
  C3-targeting RNA guide sequence portion
aauuccacgauaccuggauu

SEQ ID NO: 1524 - RNA, 20 nt, Artificial Sequence
  C3-targeting RNA guide sequence portion
aauuccaugauaccuggauu

SEQ ID NO: 1525 - RNA, 20 nt, Artificial Sequence
  C3-targeting RNA guide sequence portion
aauucuacagggaccuggac

SEQ ID NO: 1526 - RNA, 20 nt, Artificial Sequence
  C3-targeting RNA guide sequence portion
aauucuagaaacaucccaaa

SEQ ID NO: 1527 - RNA, 20 nt, Artificial Sequence
  C3-targeting RNA guide sequence portion
aauugaggucaucuguuggu

SEQ ID NO: 1528 - RNA, 20 nt, Artificial Sequence
  C3-targeting RNA guide sequence portion
aauugauuguauuuauuagg

SEQ ID NO: 1529 - RNA, 20 nt, Artificial Sequence
  C3-targeting RNA guide sequence portion
aauugcaaguccccaagcug

SEQ ID NO: 1530 - RNA, 20 nt, Artificial Sequence
  C3-targeting RNA guide sequence portion
aauuggaguuugggauguuu

SEQ ID NO: 1531 - RNA, 20 nt, Artificial Sequence
  C3-targeting RNA guide sequence portion
aauuuucaguguggguuuaa

SEQ ID NO: 1532 - RNA, 20 nt, Artificial Sequence
  C3-targeting RNA guide sequence portion
acaaacacccaaaugcaccc

SEQ ID NO: 1533 - RNA, 20 nt, Artificial Sequence
  C3-targeting RNA guide sequence portion
acaaacacccaacccauaaa

SEQ ID NO: 1534 - RNA, 20 nt, Artificial Sequence
  C3-targeting RNA guide sequence portion
acaaacagggcugguucugg

SEQ ID NO: 1535 - RNA, 20 nt, Artificial Sequence
  C3-targeting RNA guide sequence portion
acaagauuugggaguuugca

SEQ ID NO: 1536 - RNA, 20 nt, Artificial Sequence
  C3-targeting RNA guide sequence portion
acaagcccacucccgugccc

SEQ ID NO: 1537 - RNA, 20 nt, Artificial Sequence
  C3-targeting RNA guide sequence portion
acaaucaauuccaaaugccc

SEQ ID NO: 1538 - RNA, 20 nt, Artificial Sequence
  C3-targeting RNA guide sequence portion
acaaucgccuaaacccacac

SEQ ID NO: 1539 - RNA, 20 nt, Artificial Sequence
  C3-targeting RNA guide sequence portion
acacagccugccaggcgcug

SEQ ID NO: 1540 - RNA, 20 nt, Artificial Sequence
  C3-targeting RNA guide sequence portion
acacaucccaccaaacccug

SEQ ID NO: 1541 - RNA, 20 nt, Artificial Sequence
  C3-targeting RNA guide sequence portion
acacaugccccaaacccuaa

SEQ ID NO: 1542 - RNA, 20 nt, Artificial Sequence
  C3-targeting RNA guide sequence portion
acaccacauacacccuaaac

SEQ ID NO: 1543 - RNA, 20 nt, Artificial Sequence
  C3-targeting RNA guide sequence portion
acacccaaacucucaggcag

SEQ ID NO: 1544 - RNA, 20 nt, Artificial Sequence
  C3-targeting RNA guide sequence portion
acacccaaaugcacccugaa

SEQ ID NO: 1545 - RNA, 20 nt, Artificial Sequence
  C3-targeting RNA guide sequence portion
acacccaacccauaaacacc

SEQ ID NO: 1546 - RNA, 20 nt, Artificial Sequence
  C3-targeting RNA guide sequence portion
acaccccaguccuaauaaau

SEQ ID NO: 1547 - RNA, 20 nt, Artificial Sequence
  C3-targeting RNA guide sequence portion
acacccuaaaccaacagaug

SEQ ID NO: 1548 - RNA, 20 nt, Artificial Sequence
  C3-targeting RNA guide sequence portion
acacccucaacucuaccuac

SEQ ID NO: 1549 - RNA, 20 nt, Artificial Sequence
  C3-targeting RNA guide sequence portion
acacucaaacucccggacac

SEQ ID NO: 1550 - RNA, 20 nt, Artificial Sequence
  C3-targeting RNA guide sequence portion
acacuccaaauauguaaaca

SEQ ID NO: 1551 - RNA, 20 nt, Artificial Sequence
  C3-targeting RNA guide sequence portion
acacugaaaauugcaagucc

SEQ ID NO: 1552 - RNA, 20 nt, Artificial Sequence
  C3-targeting RNA guide sequence portion
acagaugaccucaauucuag

SEQ ID NO: 1553 - RNA, 20 nt, Artificial Sequence
  C3-targeting RNA guide sequence portion
acagcagccaccaugacucc

SEQ ID NO: 1554 - RNA, 20 nt, Artificial Sequence
  C3-targeting RNA guide sequence portion
acagccugccaggcgcugac

SEQ ID NO: 1555 - RNA, 20 nt, Artificial Sequence
  C3-targeting RNA guide sequence portion
acaggcagcccaaauauaua

SEQ ID NO: 1556 - RNA, 20 nt, Artificial Sequence
  C3-targeting RNA guide sequence portion
acaggcagcccaaauguaua

SEQ ID NO: 1557 - RNA, 20 nt, Artificial Sequence
  C3-targeting RNA guide sequence portion
acagggaccuggacccccaa

SEQ ID NO: 1558 - RNA, 20 nt, Artificial Sequence
  C3-targeting RNA guide sequence portion
acagggcugguucuggggug

SEQ ID NO: 1559 - RNA, 20 nt, Artificial Sequence
  C3-targeting RNA guide sequence portion
acauacacccuaaaccaaca

SEQ ID NO: 1560 - RNA, 20 nt, Artificial Sequence
  C3-targeting RNA guide sequence portion
acauacgccaaaaccucuaa

SEQ ID NO: 1561 - RNA, 20 nt, Artificial Sequence
  C3-targeting RNA guide sequence portion
acauauuuggaguguuuaga

SEQ ID NO: 1562 - RNA, 20 nt, Artificial Sequence
  C3-targeting RNA guide sequence portion
acaucccaaacuccaauucc

SEQ ID NO: 1563 - RNA, 20 nt, Artificial Sequence
  C3-targeting RNA guide sequence portion
acaucccaccaaacccugaa

SEQ ID NO: 1564 - RNA, 20 nt, Artificial Sequence
  C3-targeting RNA guide sequence portion
acauccguggaaugacaagc

SEQ ID NO: 1565 - RNA, 20 nt, Artificial Sequence
  C3-targeting RNA guide sequence portion
acaugaacccgaaguagcca

SEQ ID NO: 1566 - RNA, 20 nt, Artificial Sequence
  C3-targeting RNA guide sequence portion
acaugccccaaacccuaaac

SEQ ID NO: 1567 - RNA, 20 nt, Artificial Sequence
  C3-targeting RNA guide sequence portion
acaugggcaggacagcagcc

SEQ ID NO: 1568 - RNA, 20 nt, Artificial Sequence
  C3-targeting RNA guide sequence portion
acauuugggcugccugagag

SEQ ID NO: 1569 - RNA, 20 nt, Artificial Sequence
  C3-targeting RNA guide sequence portion
acauuugggcugccugugag

SEQ ID NO: 1570 - RNA, 20 nt, Artificial Sequence
  C3-targeting RNA guide sequence portion
acauuuggggguccaggucc

SEQ ID NO: 1571 - RNA, 20 nt, Artificial Sequence
  C3-targeting RNA guide sequence portion
accaaacccugaaccuucca

SEQ ID NO: 1572 - RNA, 20 nt, Artificial Sequence
  C3-targeting RNA guide sequence portion
accaacagaugaccucaauu

SEQ ID NO: 1573 - RNA, 20 nt, Artificial Sequence
  C3-targeting RNA guide sequence portion
accacauacacccuaaacca

SEQ ID NO: 1574 - RNA, 20 nt, Artificial Sequence
  C3-targeting RNA guide sequence portion
accacaugggcaggacagca

SEQ ID NO: 1575 - RNA, 20 nt, Artificial Sequence
  C3-targeting RNA guide sequence portion
accagaggcuggggcacaca

SEQ ID NO: 1576 - RNA, 20 nt, Artificial Sequence
  C3-targeting RNA guide sequence portion
accagcccuguuugugggua

SEQ ID NO: 1577 - RNA, 20 nt, Artificial Sequence
  C3-targeting RNA guide sequence portion
accagcgucagcaacuccuc

SEQ ID NO: 1578 - RNA, 20 nt, Artificial Sequence
  C3-targeting RNA guide sequence portion
accauaccuggauuccacaa

SEQ ID NO: 1579 - RNA, 20 nt, Artificial Sequence
  C3-targeting RNA guide sequence portion
accaucaaugaacaccacau

SEQ ID NO: 1580 - RNA, 20 nt, Artificial Sequence
  C3-targeting RNA guide sequence portion
accaugacucccacucucag

SEQ ID NO: 1581 - RNA, 20 nt, Artificial Sequence
  C3-targeting RNA guide sequence portion
acccaaacccacauacgcca

SEQ ID NO: 1582 - RNA, 20 nt, Artificial Sequence
  C3-targeting RNA guide sequence portion
acccaaacucacaggcagcc

SEQ ID NO: 1583 - RNA, 20 nt, Artificial Sequence
  C3-targeting RNA guide sequence portion
acccaaacucucaggcagcc

SEQ ID NO: 1584 - RNA, 20 nt, Artificial Sequence
  C3-targeting RNA guide sequence portion
acccaaaugcacccugaauu

SEQ ID NO: 1585 - RNA, 20 nt, Artificial Sequence
  C3-targeting RNA guide sequence portion
acccaacccauaaacaccca

SEQ ID NO: 1586 - RNA, 20 nt, Artificial Sequence
  C3-targeting RNA guide sequence portion
acccacaaacagggcugguu

SEQ ID NO: 1587 - RNA, 20 nt, Artificial Sequence
  C3-targeting RNA guide sequence portion
acccacaaucgccuaaaccc

SEQ ID NO: 1588 - RNA, 20 nt, Artificial Sequence
  C3-targeting RNA guide sequence portion
acccacacaugccccaaacc

SEQ ID NO: 1589 - RNA, 20 nt, Artificial Sequence
  C3-targeting RNA guide sequence portion
acccacacugaaaauugcaa

SEQ ID NO: 1590 - RNA, 20 nt, Artificial Sequence
  C3-targeting RNA guide sequence portion
acccacauacgccaaaaccu

SEQ ID NO: 1591 - RNA, 20 nt, Artificial Sequence
  C3-targeting RNA guide sequence portion
acccagccuaaaccuccaac

SEQ ID NO: 1592 - RNA, 20 nt, Artificial Sequence
  C3-targeting RNA guide sequence portion
acccauaaacacccaaacuc

SEQ ID NO: 1593 - RNA, 20 nt, Artificial Sequence
  C3-targeting RNA guide sequence portion
accccaaacccagccuaaac

SEQ ID NO: 1594 - RNA, 20 nt, Artificial Sequence
  C3-targeting RNA guide sequence portion
accccagaaccagcccuguu

SEQ ID NO: 1595 - RNA, 20 nt, Artificial Sequence
  C3-targeting RNA guide sequence portion
accccaguccuaauaaauac

SEQ ID NO: 1596 - RNA, 20 nt, Artificial Sequence
  C3-targeting RNA guide sequence portion
acccccaaaugucugcuucc

SEQ ID NO: 1597 - RNA, 20 nt, Artificial Sequence
  C3-targeting RNA guide sequence portion
acccccaaccgcaccaucaa

SEQ ID NO: 1598 - RNA, 20 nt, Artificial Sequence
  C3-targeting RNA guide sequence portion
accccugaauccacaaacac

SEQ ID NO: 1599 - RNA, 20 nt, Artificial Sequence
  C3-targeting RNA guide sequence portion
acccgaaguagccaaucuuu

SEQ ID NO: 1600 - RNA, 20 nt, Artificial Sequence
  C3-targeting RNA guide sequence portion
acccuaaaccaacagaugac

SEQ ID NO: 1601 - RNA, 20 nt, Artificial Sequence
  C3-targeting RNA guide sequence portion
acccuaaaccucuaccucuc

SEQ ID NO: 1602 - RNA, 20 nt, Artificial Sequence
  C3-targeting RNA guide sequence portion
acccucaacucuaccuaccc

SEQ ID NO: 1603 - RNA, 20 nt, Artificial Sequence
  C3-targeting RNA guide sequence portion
acccugaaccuuccaaccag

SEQ ID NO: 1604 - RNA, 20 nt, Artificial Sequence
  C3-targeting RNA guide sequence portion
acccugaauucuacagggac

SEQ ID NO: 1605 - RNA, 20 nt, Artificial Sequence
  C3-targeting RNA guide sequence portion
accgcaccaucaaugaacac

SEQ ID NO: 1606 - RNA, 20 nt, Artificial Sequence
  C3-targeting RNA guide sequence portion
accgucucaaccacaugggc

SEQ ID NO: 1607 - RNA, 20 nt, Artificial Sequence
  C3-targeting RNA guide sequence portion
accuacccaaacccacauac

SEQ ID NO: 1608 - RNA, 20 nt, Artificial Sequence
  C3-targeting RNA guide sequence portion
accucaaaucuuagagcacc

SEQ ID NO: 1609 - RNA, 20 nt, Artificial Sequence
  C3-targeting RNA guide sequence portion
accucaauucuagaaacauc

SEQ ID NO: 1610 - RNA, 20 nt, Artificial Sequence
  C3-targeting RNA guide sequence portion
accuccaacaccccaguccu

SEQ ID NO: 1611 - RNA, 20 nt, Artificial Sequence
  C3-targeting RNA guide sequence portion
accucuaaaccucaaaucuu

SEQ ID NO: 1612 - RNA, 20 nt, Artificial Sequence
  C3-targeting RNA guide sequence portion
accucuaccucucuaaacac

SEQ ID NO: 1613 - RNA, 20 nt, Artificial Sequence
  C3-targeting RNA guide sequence portion
accucucuaaacacuccaaa

SEQ ID NO: 1614 - RNA, 20 nt, Artificial Sequence
  C3-targeting RNA guide sequence portion
accugcuaaccccugaaucc

SEQ ID NO: 1615 - RNA, 20 nt, Artificial Sequence
  C3-targeting RNA guide sequence portion
accuggacccccaaaugucu

SEQ ID NO: 1616 - RNA, 20 nt, Artificial Sequence
  C3-targeting RNA guide sequence portion
accuggauuccacaaacacc

SEQ ID NO: 1617 - RNA, 20 nt, Artificial Sequence
  C3-targeting RNA guide sequence portion
accuuccaaccagcgucagc

SEQ ID NO: 1618 - RNA, 20 nt, Artificial Sequence
  C3-targeting RNA guide sequence portion
acgagggggccacacauccc

SEQ ID NO: 1619 - RNA, 20 nt, Artificial Sequence
  C3-targeting RNA guide sequence portion
acgauaccuggauuccacaa

SEQ ID NO: 1620 - RNA, 20 nt, Artificial Sequence
  C3-targeting RNA guide sequence portion
acgccaaaaccucuaaaccu

SEQ ID NO: 1621 - RNA, 20 nt, Artificial Sequence
  C3-targeting RNA guide sequence portion
acgccaguccucacuggagu

SEQ ID NO: 1622 - RNA, 20 nt, Artificial Sequence
  C3-targeting RNA guide sequence portion
acgcugguuggaagguucag

SEQ ID NO: 1623 - RNA, 20 nt, Artificial Sequence
  C3-targeting RNA guide sequence portion
acggaugugagacgccaguc

SEQ ID NO: 1624 - RNA, 20 nt, Artificial Sequence
  C3-targeting RNA guide sequence portion
acgggagugggcuugucauu

SEQ ID NO: 1625 - RNA, 20 nt, Artificial Sequence
  C3-targeting RNA guide sequence portion
acgguggcagugcccagaga

SEQ ID NO: 1626 - RNA, 20 nt, Artificial Sequence
  C3-targeting RNA guide sequence portion
acuauacaugaacccgaagu

SEQ ID NO: 1627 - RNA, 20 nt, Artificial Sequence
  C3-targeting RNA guide sequence portion
acucaaacucccggacaccc

SEQ ID NO: 1628 - RNA, 20 nt, Artificial Sequence
  C3-targeting RNA guide sequence portion
acucacaggcagcccaaaua

SEQ ID NO: 1629 - RNA, 20 nt, Artificial Sequence
  C3-targeting RNA guide sequence portion
acucacaggcagcccaaaug

SEQ ID NO: 1630 - RNA, 20 nt, Artificial Sequence
  C3-targeting RNA guide sequence portion
acuccaaauauguaaacacu

SEQ ID NO: 1631 - RNA, 20 nt, Artificial Sequence
  C3-targeting RNA guide sequence portion
acuccaauuccaccauaccu

SEQ ID NO: 1632 - RNA, 20 nt, Artificial Sequence
  C3-targeting RNA guide sequence portion
acuccaauuccacgauaccu

SEQ ID NO: 1633 - RNA, 20 nt, Artificial Sequence
  C3-targeting RNA guide sequence portion
acuccaauuccaugauaccu

SEQ ID NO: 1634 - RNA, 20 nt, Artificial Sequence
  C3-targeting RNA guide sequence portion
acuccagugaggacuggcgu

SEQ ID NO: 1635 - RNA, 20 nt, Artificial Sequence
  C3-targeting RNA guide sequence portion
acucccaaaucuuguaaagu

SEQ ID NO: 1636 - RNA, 20 nt, Artificial Sequence
  C3-targeting RNA guide sequence portion
acucccacucucagccagcu

SEQ ID NO: 1637 - RNA, 20 nt, Artificial Sequence
  C3-targeting RNA guide sequence portion
acucccggacacccucaacu

SEQ ID NO: 1638 - RNA, 20 nt, Artificial Sequence
  C3-targeting RNA guide sequence portion
acuccuccaagucucuggac

SEQ ID NO: 1639 - RNA, 20 nt, Artificial Sequence
  C3-targeting RNA guide sequence portion
acucggagguuuggacuuua

SEQ ID NO: 1640 - RNA, 20 nt, Artificial Sequence
  C3-targeting RNA guide sequence portion
acucuacccacaaacagggc

SEQ ID NO: 1641 - RNA, 20 nt, Artificial Sequence
  C3-targeting RNA guide sequence portion
acucuaccuacccaaaccca

SEQ ID NO: 1642 - RNA, 20 nt, Artificial Sequence
  C3-targeting RNA guide sequence portion
acucucagccagcugggccu

SEQ ID NO: 1643 - RNA, 20 nt, Artificial Sequence
  C3-targeting RNA guide sequence portion
acucucaggcagcccaaaug

SEQ ID NO: 1644 - RNA, 20 nt, Artificial Sequence
  C3-targeting RNA guide sequence portion
acugaaaauugcaagucccc

SEQ ID NO: 1645 - RNA, 20 nt, Artificial Sequence
  C3-targeting RNA guide sequence portion
acugccaccgucucaaccac

SEQ ID NO: 1646 - RNA, 20 nt, Artificial Sequence
  C3-targeting RNA guide sequence portion
acugccggcgcacuugccaa

SEQ ID NO: 1647 - RNA, 20 nt, Artificial Sequence
  C3-targeting RNA guide sequence portion
acuggagucagcgccuggca

SEQ ID NO: 1648 - RNA, 20 nt, Artificial Sequence
  C3-targeting RNA guide sequence portion
acuggauccucuccaggacc

SEQ ID NO: 1649 - RNA, 20 nt, Artificial Sequence
  C3-targeting RNA guide sequence portion
acuggcgucucacauccgug

SEQ ID NO: 1650 - RNA, 20 nt, Artificial Sequence
  C3-targeting RNA guide sequence portion
acugggguguuggagguuua

SEQ ID NO: 1651 - RNA, 20 nt, Artificial Sequence
  C3-targeting RNA guide sequence portion
acuuccagacccacaaucgc

SEQ ID NO: 1652 - RNA, 20 nt, Artificial Sequence
  C3-targeting RNA guide sequence portion
acuucggguucauguauagu

SEQ ID NO: 1653 - RNA, 20 nt, Artificial Sequence
  C3-targeting RNA guide sequence portion
acuugcaauuuucagugugg

SEQ ID NO: 1654 - RNA, 20 nt, Artificial Sequence
  C3-targeting RNA guide sequence portion
acuugccaaugccauuaucu

SEQ ID NO: 1655 - RNA, 20 nt, Artificial Sequence
  C3-targeting RNA guide sequence portion
acuuggaggaguugcugacg

SEQ ID NO: 1656 - RNA, 20 nt, Artificial Sequence
  C3-targeting RNA guide sequence portion
acuuuacaagauuugggagu

SEQ ID NO: 1657 - RNA, 20 nt, Artificial Sequence
  C3-targeting RNA guide sequence portion
agaaacaucccaaacuccaa

SEQ ID NO: 1658 - RNA, 20 nt, Artificial Sequence
  C3-targeting RNA guide sequence portion
agaaccagcccuguuugugg

SEQ ID NO: 1659 - RNA, 20 nt, Artificial Sequence
  C3-targeting RNA guide sequence portion
agaagauaauggcauuggca

SEQ ID NO: 1660 - RNA, 20 nt, Artificial Sequence
  C3-targeting RNA guide sequence portion
agaauucagggugcauuugg

SEQ ID NO: 1661 - RNA, 20 nt, Artificial Sequence
  C3-targeting RNA guide sequence portion
agaauugaggucaucuguug

SEQ ID NO: 1662 - RNA, 20 nt, Artificial Sequence
  C3-targeting RNA guide sequence portion
agacauuuggggguccaggu

SEQ ID NO: 1663 - RNA, 20 nt, Artificial Sequence
  C3-targeting RNA guide sequence portion
agacccacaaucgccuaaac

SEQ ID NO: 1664 - RNA, 20 nt, Artificial Sequence
  C3-targeting RNA guide sequence portion
agacgccaguccucacugga

SEQ ID NO: 1665 - RNA, 20 nt, Artificial Sequence
  C3-targeting RNA guide sequence portion
agacgguggcagugcccaga

SEQ ID NO: 1666 - RNA, 20 nt, Artificial Sequence
  C3-targeting RNA guide sequence portion
agacucggagguuuggacuu

SEQ ID NO: 1667 - RNA, 20 nt, Artificial Sequence
  C3-targeting RNA guide sequence portion
agacuuggaggaguugcuga

SEQ ID NO: 1668 - RNA, 20 nt, Artificial Sequence
  C3-targeting RNA guide sequence portion
agagaagauaauggcauugg

SEQ ID NO: 1669 - RNA, 20 nt, Artificial Sequence
  C3-targeting RNA guide sequence portion
agagacuuggaggaguugcu

SEQ ID NO: 1670 - RNA, 20 nt, Artificial Sequence
  C3-targeting RNA guide sequence portion
agagagguagagguuuaggg

SEQ ID NO: 1671 - RNA, 20 nt, Artificial Sequence
  C3-targeting RNA guide sequence portion
agagcaccccaaacccagcc

SEQ ID NO: 1672 - RNA, 20 nt, Artificial Sequence
  C3-targeting RNA guide sequence portion
agaggauccagugacugccg

SEQ ID NO: 1673 - RNA, 20 nt, Artificial Sequence
  C3-targeting RNA guide sequence portion
agaggcuggggcacacagcc

SEQ ID NO: 1674 - RNA, 20 nt, Artificial Sequence
  C3-targeting RNA guide sequence portion
agagguagagguuuaggguu

SEQ ID NO: 1675 - RNA, 20 nt, Artificial Sequence
  C3-targeting RNA guide sequence portion
agagguuuaggguuuggggc

SEQ ID NO: 1676 - RNA, 20 nt, Artificial Sequence
  C3-targeting RNA guide sequence portion
agagguuuuggcguaugugg

SEQ ID NO: 1677 - RNA, 20 nt, Artificial Sequence
  C3-targeting RNA guide sequence portion
agagugggagucaugguggc

SEQ ID NO: 1678 - RNA, 20 nt, Artificial Sequence
  C3-targeting RNA guide sequence portion
agaguugaggguguccggga

SEQ ID NO: 1679 - RNA, 20 nt, Artificial Sequence
  C3-targeting RNA guide sequence portion
agaguuuggguguuuauggg

SEQ ID NO: 1680 - RNA, 20 nt, Artificial Sequence
  C3-targeting RNA guide sequence portion
agauaauggcauuggcaagu

SEQ ID NO: 1681 - RNA, 20 nt, Artificial Sequence
  C3-targeting RNA guide sequence portion
agaugaccucaauucuagaa

SEQ ID NO: 1682 - RNA, 20 nt, Artificial Sequence
  C3-targeting RNA guide sequence portion
agauuggcuacuucggguuc

SEQ ID NO: 1683 - RNA, 20 nt, Artificial Sequence
  C3-targeting RNA guide sequence portion
agauuugagguuuagagguu

SEQ ID NO: 1684 - RNA, 20 nt, Artificial Sequence
  C3-targeting RNA guide sequence portion
agauuugggaguuugcagcu

SEQ ID NO: 1685 - RNA, 20 nt, Artificial Sequence
  C3-targeting RNA guide sequence portion
agcaacuccuccaagucucu

SEQ ID NO: 1686 - RNA, 20 nt, Artificial Sequence
  C3-targeting RNA guide sequence portion
agcaccccaaacccagccua

SEQ ID NO: 1687 - RNA, 20 nt, Artificial Sequence
  C3-targeting RNA guide sequence portion
agcagacauuugggggucca

SEQ ID NO: 1688 - RNA, 20 nt, Artificial Sequence
  C3-targeting RNA guide sequence portion
agcagccaccaugacuccca

SEQ ID NO: 1689 - RNA, 20 nt, Artificial Sequence
  C3-targeting RNA guide sequence portion
agcagguugggaaugauuau

SEQ ID NO: 1690 - RNA, 20 nt, Artificial Sequence
  C3-targeting RNA guide sequence portion
agccaaucuuuaaacccaca

SEQ ID NO: 1691 - RNA, 20 nt, Artificial Sequence
  C3-targeting RNA guide sequence portion
agccaccaugacucccacuc

SEQ ID NO: 1692 - RNA, 20 nt, Artificial Sequence
  C3-targeting RNA guide sequence portion
agccagcugggccuggccuu

SEQ ID NO: 1693 - RNA, 20 nt, Artificial Sequence
  C3-targeting RNA guide sequence portion
agcccaaauauauauaauca

SEQ ID NO: 1694 - RNA, 20 nt, Artificial Sequence
  C3-targeting RNA guide sequence portion
agcccacucccgugccccac

SEQ ID NO: 1695 - RNA, 20 nt, Artificial Sequence
  C3-targeting RNA guide sequence portion
agcccuguuuguggguagag

SEQ ID NO: 1696 - RNA, 20 nt, Artificial Sequence
  C3-targeting RNA guide sequence portion
agccuaaaccuccaacaccc

SEQ ID NO: 1697 - RNA, 20 nt, Artificial Sequence
  C3-targeting RNA guide sequence portion
agccucugguccuggagagg

SEQ ID NO: 1698 - RNA, 20 nt, Artificial Sequence
  C3-targeting RNA guide sequence portion
agccugccaggcgcugacuc

SEQ ID NO: 1699 - RNA, 20 nt, Artificial Sequence
  C3-targeting RNA guide sequence portion
agccugggcaacgagggggc

SEQ ID NO: 1700 - RNA, 20 nt, Artificial Sequence
  C3-targeting RNA guide sequence portion
agcgccuggcaggcugugug

SEQ ID NO: 1701 - RNA, 20 nt, Artificial Sequence
  C3-targeting RNA guide sequence portion
agcgucagcaacuccuccaa

SEQ ID NO: 1702 - RNA, 20 nt, Artificial Sequence
  C3-targeting RNA guide sequence portion
agcugcaaacucccaaaucu

SEQ ID NO: 1703 - RNA, 20 nt, Artificial Sequence
  C3-targeting RNA guide sequence portion
agcuggcugagagugggagu

SEQ ID NO: 1704 - RNA, 20 nt, Artificial Sequence
  C3-targeting RNA guide sequence portion
agcugggccuggccuuugaa

SEQ ID NO: 1705 - RNA, 20 nt, Artificial Sequence
  C3-targeting RNA guide sequence portion
agcuuggggacuugcaauuu

SEQ ID NO: 1706 - RNA, 20 nt, Artificial Sequence
  C3-targeting RNA guide sequence portion
aggacagcagccaccaugac

SEQ ID NO: 1707 - RNA, 20 nt, Artificial Sequence
  C3-targeting RNA guide sequence portion
aggaccagaggcuggggcac

SEQ ID NO: 1708 - RNA, 20 nt, Artificial Sequence
  C3-targeting RNA guide sequence portion
aggacuggcgucucacaucc

SEQ ID NO: 1709 - RNA, 20 nt, Artificial Sequence
  C3-targeting RNA guide sequence portion
aggacugggguguuggaggu

SEQ ID NO: 1710 - RNA, 20 nt, Artificial Sequence
  C3-targeting RNA guide sequence portion
aggaguugcugacgcugguu

SEQ ID NO: 1711 - RNA, 20 nt, Artificial Sequence
  C3-targeting RNA guide sequence portion
aggauccagugacugccggc

SEQ ID NO: 1712 - RNA, 20 nt, Artificial Sequence
  C3-targeting RNA guide sequence portion
aggcagcccaaauauauaua

SEQ ID NO: 1713 - RNA, 20 nt, Artificial Sequence
  C3-targeting RNA guide sequence portion
aggccaggcccagcuggcug

SEQ ID NO: 1714 - RNA, 20 nt, Artificial Sequence
  C3-targeting RNA guide sequence portion
aggcccagcuggcugagagu

SEQ ID NO: 1715 - RNA, 20 nt, Artificial Sequence
  C3-targeting RNA guide sequence portion
aggcgauugugggucuggaa

SEQ ID NO: 1716 - RNA, 20 nt, Artificial Sequence
  C3-targeting RNA guide sequence portion
aggcgcugacuccagugagg

SEQ ID NO: 1717 - RNA, 20 nt, Artificial Sequence
  C3-targeting RNA guide sequence portion
aggcuggggcacacagccug

SEQ ID NO: 1718 - RNA, 20 nt, Artificial Sequence
  C3-targeting RNA guide sequence portion
aggcuggguuuggggugcuc

SEQ ID NO: 1719 - RNA, 20 nt, Artificial Sequence
  C3-targeting RNA guide sequence portion
aggcugugugccccagccuc

SEQ ID NO: 1720 - RNA, 20 nt, Artificial Sequence
  C3-targeting RNA guide sequence portion
aggcuuucaaaggccaggcc

SEQ ID NO: 1721 - RNA, 20 nt, Artificial Sequence
  C3-targeting RNA guide sequence portion
agggaccuggacccccaaau

SEQ ID NO: 1722 - RNA, 20 nt, Artificial Sequence
  C3-targeting RNA guide sequence portion
agggcugguucuggggugga

SEQ ID NO: 1723 - RNA, 20 nt, Artificial Sequence
  C3-targeting RNA guide sequence portion
agggggccacacaucccacc

SEQ ID NO: 1724 - RNA, 20 nt, Artificial Sequence
  C3-targeting RNA guide sequence portion
agggguuagcagguugggaa

SEQ ID NO: 1725 - RNA, 20 nt, Artificial Sequence
  C3-targeting RNA guide sequence portion
agggugcauuuggguguuug

SEQ ID NO: 1726 - RNA, 20 nt, Artificial Sequence
  C3-targeting RNA guide sequence portion
aggguguaugugguguucau

SEQ ID NO: 1727 - RNA, 20 nt, Artificial Sequence
  C3-targeting RNA guide sequence portion
aggguguccgggaguuugag

SEQ ID NO: 1728 - RNA, 20 nt, Artificial Sequence
  C3-targeting RNA guide sequence portion
aggguuuggggcaugugugg

SEQ ID NO: 1729 - RNA, 20 nt, Artificial Sequence
  C3-targeting RNA guide sequence portion
aggguuuggugggaugugug

SEQ ID NO: 1730 - RNA, 20 nt, Artificial Sequence
  C3-targeting RNA guide sequence portion
agguagagguuuaggguuug

SEQ ID NO: 1731 - RNA, 20 nt, Artificial Sequence
  C3-targeting RNA guide sequence portion
agguagaguugagggugucc

SEQ ID NO: 1732 - RNA, 20 nt, Artificial Sequence
  C3-targeting RNA guide sequence portion
agguaucauggaauuggagu

SEQ ID NO: 1733 - RNA, 20 nt, Artificial Sequence
  C3-targeting RNA guide sequence portion
agguaucguggaauuggagu

SEQ ID NO: 1734 - RNA, 20 nt, Artificial Sequence
  C3-targeting RNA guide sequence portion
agguaugguggaauuggagu

SEQ ID NO: 1735 - RNA, 20 nt, Artificial Sequence
  C3-targeting RNA guide sequence portion
aggucaucuguugguuuagg

SEQ ID NO: 1736 - RNA, 20 nt, Artificial Sequence
  C3-targeting RNA guide sequence portion
aggucccuguagaauucagg

SEQ ID NO: 1737 - RNA, 20 nt, Artificial Sequence
  C3-targeting RNA guide sequence portion
agguucaggguuugguggga

SEQ ID NO: 1738 - RNA, 20 nt, Artificial Sequence
  C3-targeting RNA guide sequence portion
agguuuagagguuuuggcgu

SEQ ID NO: 1739 - RNA, 20 nt, Artificial Sequence
  C3-targeting RNA guide sequence portion
agguuuaggcuggguuuggg

SEQ ID NO: 1740 - RNA, 20 nt, Artificial Sequence
  C3-targeting RNA guide sequence portion
agguuuaggguuuggggcau

SEQ ID NO: 1741 - RNA, 20 nt, Artificial Sequence
  C3-targeting RNA guide sequence portion
agguuuggacuuuacaagau

SEQ ID NO: 1742 - RNA, 20 nt, Artificial Sequence
  C3-targeting RNA guide sequence portion
agguuuuggcguaugugggu

SEQ ID NO: 1743 - RNA, 20 nt, Artificial Sequence
  C3-targeting RNA guide sequence portion
aguagccaaucuuuaaaccc

SEQ ID NO: 1744 - RNA, 20 nt, Artificial Sequence
  C3-targeting RNA guide sequence portion
agucacuggauccucuccag

SEQ ID NO: 1745 - RNA, 20 nt, Artificial Sequence
  C3-targeting RNA guide sequence portion
agucagcgccuggcaggcug

SEQ ID NO: 1746 - RNA, 20 nt, Artificial Sequence
  C3-targeting RNA guide sequence portion
agucaugguggcugcugucc

SEQ ID NO: 1747 - RNA, 20 nt, Artificial Sequence
  C3-targeting RNA guide sequence portion
aguccagagacuuggaggag

SEQ ID NO: 1748 - RNA, 20 nt, Artificial Sequence
  C3-targeting RNA guide sequence portion
aguccccaagcugcaaacuc

SEQ ID NO: 1749 - RNA, 20 nt, Artificial Sequence
  C3-targeting RNA guide sequence portion
aguccucacuggagucagcg

SEQ ID NO: 1750 - RNA, 20 nt, Artificial Sequence
  C3-targeting RNA guide sequence portion
agucucuggacuuccagacc

SEQ ID NO: 1751 - RNA, 20 nt, Artificial Sequence
  C3-targeting RNA guide sequence portion
agugacugccggcgcacuug

SEQ ID NO: 1752 - RNA, 20 nt, Artificial Sequence
  C3-targeting RNA guide sequence portion
agugaggacuggcgucucac

SEQ ID NO: 1753 - RNA, 20 nt, Artificial Sequence
  C3-targeting RNA guide sequence portion
agugcccagagaagauaaug

SEQ ID NO: 1754 - RNA, 20 nt, Artificial Sequence
  C3-targeting RNA guide sequence portion
agugcgccggcagucacugg

SEQ ID NO: 1755 - RNA, 20 nt, Artificial Sequence
  C3-targeting RNA guide sequence portion
agugggagucaugguggcug

SEQ ID NO: 1756 - RNA, 20 nt, Artificial Sequence
  C3-targeting RNA guide sequence portion
agugggcuugucauuccacg

SEQ ID NO: 1757 - RNA, 20 nt, Artificial Sequence
  C3-targeting RNA guide sequence portion
aguggggcacgggagugggc

SEQ ID NO: 1758 - RNA, 20 nt, Artificial Sequence
  C3-targeting RNA guide sequence portion
agugguuaugacucuaccca

SEQ ID NO: 1759 - RNA, 20 nt, Artificial Sequence
  C3-targeting RNA guide sequence portion
aguguggguuuaaagauugg

SEQ ID NO: 1760 - RNA, 20 nt, Artificial Sequence
  C3-targeting RNA guide sequence portion
aguguuuacauauuuggagu

SEQ ID NO: 1761 - RNA, 20 nt, Artificial Sequence
  C3-targeting RNA guide sequence portion
aguguuuagagagguagagg

SEQ ID NO: 1762 - RNA, 20 nt, Artificial Sequence
  C3-targeting RNA guide sequence portion
aguugaggguguccgggagu

SEQ ID NO: 1763 - RNA, 20 nt, Artificial Sequence
  C3-targeting RNA guide sequence portion
aguugcugacgcugguugga

SEQ ID NO: 1764 - RNA, 20 nt, Artificial Sequence
  C3-targeting RNA guide sequence portion
aguuggggcauuuggaauug

SEQ ID NO: 1765 - RNA, 20 nt, Artificial Sequence
  C3-targeting RNA guide sequence portion
aguuuauauacauuugggcu

SEQ ID NO: 1766 - RNA, 20 nt, Artificial Sequence
  C3-targeting RNA guide sequence portion
aguuugaguguuuacauauu

SEQ ID NO: 1767 - RNA, 20 nt, Artificial Sequence
  C3-targeting RNA guide sequence portion
aguuugcagcuuggggacuu

SEQ ID NO: 1768 - RNA, 20 nt, Artificial Sequence
  C3-targeting RNA guide sequence portion
aguuugggauguuucuagaa

SEQ ID NO: 1769 - RNA, 20 nt, Artificial Sequence
  C3-targeting RNA guide sequence portion
aguuuggguguuuauggguu

SEQ ID NO: 1770 - RNA, 20 nt, Artificial Sequence
  C3-targeting RNA guide sequence portion
auaaacacccaaacucucag

SEQ ID NO: 1771 - RNA, 20 nt, Artificial Sequence
  C3-targeting RNA guide sequence portion
auaaacuccaauuccacgau

SEQ ID NO: 1772 - RNA, 20 nt, Artificial Sequence
  C3-targeting RNA guide sequence portion
auaaacuccaauuccaugau

SEQ ID NO: 1773 - RNA, 20 nt, Artificial Sequence
  C3-targeting RNA guide sequence portion
auaaauacaaucaauuccaa

SEQ ID NO: 1774 - RNA, 20 nt, Artificial Sequence
  C3-targeting RNA guide sequence portion
auaaucauucccaaccugcu

SEQ ID NO: 1775 - RNA, 20 nt, Artificial Sequence
  C3-targeting RNA guide sequence portion
auaauggcauuggcaagugc

SEQ ID NO: 1776 - RNA, 20 nt, Artificial Sequence
  C3-targeting RNA guide sequence portion
auacaaucaauuccaaaugc

SEQ ID NO: 1777 - RNA, 20 nt, Artificial Sequence
  C3-targeting RNA guide sequence portion
auacacccuaaaccaacaga

SEQ ID NO: 1778 - RNA, 20 nt, Artificial Sequence
  C3-targeting RNA guide sequence portion
auacaugaacccgaaguagc

SEQ ID NO: 1779 - RNA, 20 nt, Artificial Sequence
  C3-targeting RNA guide sequence portion
auacauuugggcugccugag

SEQ ID NO: 1780 - RNA, 20 nt, Artificial Sequence
  C3-targeting RNA guide sequence portion
auacauuugggcugccugug

SEQ ID NO: 1781 - RNA, 20 nt, Artificial Sequence
  C3-targeting RNA guide sequence portion
auacgccaaaaccucuaaac

SEQ ID NO: 1782 - RNA, 20 nt, Artificial Sequence
  C3-targeting RNA guide sequence portion
auaguuggggcauuuggaau

SEQ ID NO: 1783 - RNA, 20 nt, Artificial Sequence
  C3-targeting RNA guide sequence portion
auauaaacuccaauuccacg

SEQ ID NO: 1784 - RNA, 20 nt, Artificial Sequence
  C3-targeting RNA guide sequence portion
auauaaacuccaauuccaug

SEQ ID NO: 1785 - RNA, 20 nt, Artificial Sequence
  C3-targeting RNA guide sequence portion
auauaaucauucccaaccug

SEQ ID NO: 1786 - RNA, 20 nt, Artificial Sequence
  C3-targeting RNA guide sequence portion
auauacauuugggcugccug

SEQ ID NO: 1787 - RNA, 20 nt, Artificial Sequence
  C3-targeting RNA guide sequence portion
auauauaaucauucccaacc

SEQ ID NO: 1788 - RNA, 20 nt, Artificial Sequence
  C3-targeting RNA guide sequence portion
auauauauaaucauucccaa

SEQ ID NO: 1789 - RNA, 20 nt, Artificial Sequence
  C3-targeting RNA guide sequence portion
auauauauuugggcugccug

SEQ ID NO: 1790 - RNA, 20 nt, Artificial Sequence
  C3-targeting RNA guide sequence portion
auauauuugggcugccugug

SEQ ID NO: 1791 - RNA, 20 nt, Artificial Sequence
  C3-targeting RNA guide sequence portion
auauguaaacacucaaacuc

SEQ ID NO: 1792 - RNA, 20 nt, Artificial Sequence
  C3-targeting RNA guide sequence portion
auauuuggaguguuuagaga

SEQ ID NO: 1793 - RNA, 20 nt, Artificial Sequence
  C3-targeting RNA guide sequence portion
auauuugggcugccugugag

SEQ ID NO: 1794 - RNA, 20 nt, Artificial Sequence
  C3-targeting RNA guide sequence portion
aucaaugaacaccacauaca

SEQ ID NO: 1795 - RNA, 20 nt, Artificial Sequence
  C3-targeting RNA guide sequence portion
aucaauuccaaaugccccaa

SEQ ID NO: 1796 - RNA, 20 nt, Artificial Sequence
  C3-targeting RNA guide sequence portion
aucauucccaaccugcuaac

SEQ ID NO: 1797 - RNA, 20 nt, Artificial Sequence
  C3-targeting RNA guide sequence portion
auccacaaacacccaaaugc

SEQ ID NO: 1798 - RNA, 20 nt, Artificial Sequence
  C3-targeting RNA guide sequence portion
auccagguaucauggaauug

SEQ ID NO: 1799 - RNA, 20 nt, Artificial Sequence
  C3-targeting RNA guide sequence portion
auccagguaucguggaauug

SEQ ID NO: 1800 - RNA, 20 nt, Artificial Sequence
  C3-targeting RNA guide sequence portion
auccagguaugguggaauug

SEQ ID NO: 1801 - RNA, 20 nt, Artificial Sequence
  C3-targeting RNA guide sequence portion
auccagugacugccggcgca

SEQ ID NO: 1802 - RNA, 20 nt, Artificial Sequence
  C3-targeting RNA guide sequence portion
aucccaaacuccaauuccac

SEQ ID NO: 1803 - RNA, 20 nt, Artificial Sequence
  C3-targeting RNA guide sequence portion
aucccaccaaacccugaacc

SEQ ID NO: 1804 - RNA, 20 nt, Artificial Sequence
  C3-targeting RNA guide sequence portion
auccguggaaugacaagccc

SEQ ID NO: 1805 - RNA, 20 nt, Artificial Sequence
  C3-targeting RNA guide sequence portion
auccucuccaggaccagagg

SEQ ID NO: 1806 - RNA, 20 nt, Artificial Sequence
  C3-targeting RNA guide sequence portion
aucgccuaaacccacacaug

SEQ ID NO: 1807 - RNA, 20 nt, Artificial Sequence
  C3-targeting RNA guide sequence portion
aucguggaauuggaguuuau

SEQ ID NO: 1808 - RNA, 20 nt, Artificial Sequence
  C3-targeting RNA guide sequence portion
aucuguugguuuagggugua

SEQ ID NO: 1809 - RNA, 20 nt, Artificial Sequence
  C3-targeting RNA guide sequence portion
aucuuagagcaccccaaacc

SEQ ID NO: 1810 - RNA, 20 nt, Artificial Sequence
  C3-targeting RNA guide sequence portion
aucuucucugggcacugcca

SEQ ID NO: 1811 - RNA, 20 nt, Artificial Sequence
  C3-targeting RNA guide sequence portion
aucuuguaaaguccaaaccu

SEQ ID NO: 1812 - RNA, 20 nt, Artificial Sequence
  C3-targeting RNA guide sequence portion
aucuuuaaacccacacugaa

SEQ ID NO: 1813 - RNA, 20 nt, Artificial Sequence
  C3-targeting RNA guide sequence portion
augaacaccacauacacccu

SEQ ID NO: 1814 - RNA, 20 nt, Artificial Sequence
  C3-targeting RNA guide sequence portion
augaacccgaaguagccaau

SEQ ID NO: 1815 - RNA, 20 nt, Artificial Sequence
  C3-targeting RNA guide sequence portion
augacaagcccacucccgug

SEQ ID NO: 1816 - RNA, 20 nt, Artificial Sequence
  C3-targeting RNA guide sequence portion
augaccucaauucuagaaac

SEQ ID NO: 1817 - RNA, 20 nt, Artificial Sequence
  C3-targeting RNA guide sequence portion
augacucccacucucagcca

SEQ ID NO: 1818 - RNA, 20 nt, Artificial Sequence
  C3-targeting RNA guide sequence portion
augacucuacccacaaacag

SEQ ID NO: 1819 - RNA, 20 nt, Artificial Sequence
  C3-targeting RNA guide sequence portion
augauaccuggauuccacaa

SEQ ID NO: 1820 - RNA, 20 nt, Artificial Sequence
  C3-targeting RNA guide sequence portion
augauuauauauauuugggc

SEQ ID NO: 1821 - RNA, 20 nt, Artificial Sequence
  C3-targeting RNA guide sequence portion
augcacccugaauucuacag

SEQ ID NO: 1822 - RNA, 20 nt, Artificial Sequence
  C3-targeting RNA guide sequence portion
augccauuaucuucucuggg

SEQ ID NO: 1823 - RNA, 20 nt, Artificial Sequence
  C3-targeting RNA guide sequence portion
augccccaaacccuaaaccu

SEQ ID NO: 1824 - RNA, 20 nt, Artificial Sequence
  C3-targeting RNA guide sequence portion
augccccaacuauacaugaa

SEQ ID NO: 1825 - RNA, 20 nt, Artificial Sequence
  C3-targeting RNA guide sequence portion
auggcauuggcaagugcgcc

SEQ ID NO: 1826 - RNA, 20 nt, Artificial Sequence
  C3-targeting RNA guide sequence portion
augggcaggacagcagccac

SEQ ID NO: 1827 - RNA, 20 nt, Artificial Sequence
  C3-targeting RNA guide sequence portion
auggguuggguguuugugga

SEQ ID NO: 1828 - RNA, 20 nt, Artificial Sequence
  C3-targeting RNA guide sequence portion
augguggaauuggaguuugg

SEQ ID NO: 1829 - RNA, 20 nt, Artificial Sequence
  C3-targeting RNA guide sequence portion
augguggcugcuguccugcc

SEQ ID NO: 1830 - RNA, 20 nt, Artificial Sequence
  C3-targeting RNA guide sequence portion
auguaaacacucaaacuccc

SEQ ID NO: 1831 - RNA, 20 nt, Artificial Sequence
  C3-targeting RNA guide sequence portion
auguauaguuggggcauuug

SEQ ID NO: 1832 - RNA, 20 nt, Artificial Sequence
  C3-targeting RNA guide sequence portion
auguauauaaacuccaauuc

SEQ ID NO: 1833 - RNA, 20 nt, Artificial Sequence
  C3-targeting RNA guide sequence portion
augucugcuuccaccccaga

SEQ ID NO: 1834 - RNA, 20 nt, Artificial Sequence
  C3-targeting RNA guide sequence portion
augugagacgccaguccuca

SEQ ID NO: 1835 - RNA, 20 nt, Artificial Sequence
  C3-targeting RNA guide sequence portion
auguggguuuggguagguag

SEQ ID NO: 1836 - RNA, 20 nt, Artificial Sequence
  C3-targeting RNA guide sequence portion
augugguguucauugauggu

SEQ ID NO: 1837 - RNA, 20 nt, Artificial Sequence
  C3-targeting RNA guide sequence portion
augugguugagacgguggca

SEQ ID NO: 1838 - RNA, 20 nt, Artificial Sequence
  C3-targeting RNA guide sequence portion
auguguggcccccucguugc

SEQ ID NO: 1839 - RNA, 20 nt, Artificial Sequence
  C3-targeting RNA guide sequence portion
auguguggguuuaggcgauu

SEQ ID NO: 1840 - RNA, 20 nt, Artificial Sequence
  C3-targeting RNA guide sequence portion
auguuucuagaauugagguc

SEQ ID NO: 1841 - RNA, 20 nt, Artificial Sequence
  C3-targeting RNA guide sequence portion
auuaggacugggguguugga

SEQ ID NO: 1842 - RNA, 20 nt, Artificial Sequence
  C3-targeting RNA guide sequence portion
auuauauauauuugggcugc

SEQ ID NO: 1843 - RNA, 20 nt, Artificial Sequence
  C3-targeting RNA guide sequence portion
auuaucuucucugggcacug

SEQ ID NO: 1844 - RNA, 20 nt, Artificial Sequence
  C3-targeting RNA guide sequence portion
auucagggguuagcagguug

SEQ ID NO: 1845 - RNA, 20 nt, Artificial Sequence
  C3-targeting RNA guide sequence portion
auucagggugcauuugggug

SEQ ID NO: 1846 - RNA, 20 nt, Artificial Sequence
  C3-targeting RNA guide sequence portion
auuccaaaugccccaacuau

SEQ ID NO: 1847 - RNA, 20 nt, Artificial Sequence
  C3-targeting RNA guide sequence portion
auuccacaaacacccaaccc

SEQ ID NO: 1848 - RNA, 20 nt, Artificial Sequence
  C3-targeting RNA guide sequence portion
auuccaccauaccuggauuc

SEQ ID NO: 1849 - RNA, 20 nt, Artificial Sequence
  C3-targeting RNA guide sequence portion
auuccacgauaccuggauuc

SEQ ID NO: 1850 - RNA, 20 nt, Artificial Sequence
  C3-targeting RNA guide sequence portion
auuccacggaugugagacgc

SEQ ID NO: 1851 - RNA, 20 nt, Artificial Sequence
  C3-targeting RNA guide sequence portion
auuccaugauaccuggauuc

SEQ ID NO: 1852 - RNA, 20 nt, Artificial Sequence
  C3-targeting RNA guide sequence portion
auucccaaccugcuaacccc

SEQ ID NO: 1853 - RNA, 20 nt, Artificial Sequence
  C3-targeting RNA guide sequence portion
auucuacagggaccuggacc

SEQ ID NO: 1854 - RNA, 20 nt, Artificial Sequence
  C3-targeting RNA guide sequence portion
auucuagaaacaucccaaac

SEQ ID NO: 1855 - RNA, 20 nt, Artificial Sequence
  C3-targeting RNA guide sequence portion
auugaggucaucuguugguu

SEQ ID NO: 1856 - RNA, 20 nt, Artificial Sequence
  C3-targeting RNA guide sequence portion
auugauuguauuuauuagga

SEQ ID NO: 1857 - RNA, 20 nt, Artificial Sequence
  C3-targeting RNA guide sequence portion
auugcaaguccccaagcugc

SEQ ID NO: 1858 - RNA, 20 nt, Artificial Sequence
  C3-targeting RNA guide sequence portion
auuggaguuugggauguuuc

SEQ ID NO: 1859 - RNA, 20 nt, Artificial Sequence
  C3-targeting RNA guide sequence portion
auuggcaagugcgccggcag

SEQ ID NO: 1860 - RNA, 20 nt, Artificial Sequence
  C3-targeting RNA guide sequence portion
auuggcuacuucggguucau

SEQ ID NO: 1861 - RNA, 20 nt, Artificial Sequence
  C3-targeting RNA guide sequence portion
auuguauuuauuaggacugg

SEQ ID NO: 1862 - RNA, 20 nt, Artificial Sequence
  C3-targeting RNA guide sequence portion
auugugggucuggaagucca

SEQ ID NO: 1863 - RNA, 20 nt, Artificial Sequence
  C3-targeting RNA guide sequence portion
auuuauuaggacuggggugu

SEQ ID NO: 1864 - RNA, 20 nt, Artificial Sequence
  C3-targeting RNA guide sequence portion
auuugagguuuagagguuuu

SEQ ID NO: 1865 - RNA, 20 nt, Artificial Sequence
  C3-targeting RNA guide sequence portion
auuuggaguguuuagagagg

SEQ ID NO: 1866 - RNA, 20 nt, Artificial Sequence
  C3-targeting RNA guide sequence portion
auuugggaguuugcagcuug

SEQ ID NO: 1867 - RNA, 20 nt, Artificial Sequence
  C3-targeting RNA guide sequence portion
auuugggcugccugagaguu

SEQ ID NO: 1868 - RNA, 20 nt, Artificial Sequence
  C3-targeting RNA guide sequence portion
auuuggggguccaggucccu

SEQ ID NO: 1869 - RNA, 20 nt, Artificial Sequence
  C3-targeting RNA guide sequence portion
auuuggguguuuguggauuc

SEQ ID NO: 1870 - RNA, 20 nt, Artificial Sequence
  C3-targeting RNA guide sequence portion
auuuucaguguggguuuaaa

SEQ ID NO: 1871 - RNA, 20 nt, Artificial Sequence
  C3-targeting RNA guide sequence portion
caaaaccucuaaaccucaaa

SEQ ID NO: 1872 - RNA, 20 nt, Artificial Sequence
  C3-targeting RNA guide sequence portion
caaacacccaaaugcacccu

SEQ ID NO: 1873 - RNA, 20 nt, Artificial Sequence
  C3-targeting RNA guide sequence portion
caaacacccaacccauaaac

SEQ ID NO: 1874 - RNA, 20 nt, Artificial Sequence
  C3-targeting RNA guide sequence portion
caaacagggcugguucuggg

SEQ ID NO: 1875 - RNA, 20 nt, Artificial Sequence
  C3-targeting RNA guide sequence portion
caaacccacauacgccaaaa

SEQ ID NO: 1876 - RNA, 20 nt, Artificial Sequence
  C3-targeting RNA guide sequence portion
caaacccagccuaaaccucc

SEQ ID NO: 1877 - RNA, 20 nt, Artificial Sequence
  C3-targeting RNA guide sequence portion
caaacccuaaaccucuaccu

SEQ ID NO: 1878 - RNA, 20 nt, Artificial Sequence
  C3-targeting RNA guide sequence portion
caaacccugaaccuuccaac

SEQ ID NO: 1879 - RNA, 20 nt, Artificial Sequence
  C3-targeting RNA guide sequence portion
caaacucacaggcagcccaa

SEQ ID NO: 1880 - RNA, 20 nt, Artificial Sequence
  C3-targeting RNA guide sequence portion
caaacuccaauuccaccaua

SEQ ID NO: 1881 - RNA, 20 nt, Artificial Sequence
  C3-targeting RNA guide sequence portion
caaacucccaaaucuuguaa

SEQ ID NO: 1882 - RNA, 20 nt, Artificial Sequence
  C3-targeting RNA guide sequence portion
caaacucccggacacccuca

SEQ ID NO: 1883 - RNA, 20 nt, Artificial Sequence
  C3-targeting RNA guide sequence portion
caaacucucaggcagcccaa

SEQ ID NO: 1884 - RNA, 20 nt, Artificial Sequence
  C3-targeting RNA guide sequence portion
caaaggccaggcccagcugg

SEQ ID NO: 1885 - RNA, 20 nt, Artificial Sequence
  C3-targeting RNA guide sequence portion
caaauauguaaacacucaaa

SEQ ID NO: 1886 - RNA, 20 nt, Artificial Sequence
  C3-targeting RNA guide sequence portion
caaaucuuagagcaccccaa

SEQ ID NO: 1887 - RNA, 20 nt, Artificial Sequence
  C3-targeting RNA guide sequence portion
caaaucuuguaaaguccaaa

SEQ ID NO: 1888 - RNA, 20 nt, Artificial Sequence
  C3-targeting RNA guide sequence portion
caaaugcacccugaauucua

SEQ ID NO: 1889 - RNA, 20 nt, Artificial Sequence
  C3-targeting RNA guide sequence portion
caaaugccccaacuauacau

SEQ ID NO: 1890 - RNA, 20 nt, Artificial Sequence
  C3-targeting RNA guide sequence portion
caaauguauauaaacuccaa

SEQ ID NO: 1891 - RNA, 20 nt, Artificial Sequence
  C3-targeting RNA guide sequence portion
caaaugucugcuuccacccc

SEQ ID NO: 1892 - RNA, 20 nt, Artificial Sequence
  C3-targeting RNA guide sequence portion
caacaccccaguccuaauaa

SEQ ID NO: 1893 - RNA, 20 nt, Artificial Sequence
  C3-targeting RNA guide sequence portion
caacagaugaccucaauucu

SEQ ID NO: 1894 - RNA, 20 nt, Artificial Sequence
  C3-targeting RNA guide sequence portion
caaccacaugggcaggacag

SEQ ID NO: 1895 - RNA, 20 nt, Artificial Sequence
  C3-targeting RNA guide sequence portion
caaccagcgucagcaacucc

SEQ ID NO: 1896 - RNA, 20 nt, Artificial Sequence
  C3-targeting RNA guide sequence portion
caacccauaaacacccaaac

SEQ ID NO: 1897 - RNA, 20 nt, Artificial Sequence
  C3-targeting RNA guide sequence portion
caaccgcaccaucaaugaac

SEQ ID NO: 1898 - RNA, 20 nt, Artificial Sequence
  C3-targeting RNA guide sequence portion
caaccugcuaaccccugaau

SEQ ID NO: 1899 - RNA, 20 nt, Artificial Sequence
  C3-targeting RNA guide sequence portion
caacgagggggccacacauc

SEQ ID NO: 1900 - RNA, 20 nt, Artificial Sequence
  C3-targeting RNA guide sequence portion
caacuauacaugaacccgaa

SEQ ID NO: 1901 - RNA, 20 nt, Artificial Sequence
  C3-targeting RNA guide sequence portion
caacuccuccaagucucugg

SEQ ID NO: 1902 - RNA, 20 nt, Artificial Sequence
  C3-targeting RNA guide sequence portion
caacucuaccuacccaaacc

SEQ ID NO: 1903 - RNA, 20 nt, Artificial Sequence
  C3-targeting RNA guide sequence portion
caagauuugggaguuugcag

SEQ ID NO: 1904 - RNA, 20 nt, Artificial Sequence
  C3-targeting RNA guide sequence portion
caagcccacucccgugcccc

SEQ ID NO: 1905 - RNA, 20 nt, Artificial Sequence
  C3-targeting RNA guide sequence portion
caagcugcaaacucccaaau

SEQ ID NO: 1906 - RNA, 20 nt, Artificial Sequence
  C3-targeting RNA guide sequence portion
caaguccccaagcugcaaac

SEQ ID NO: 1907 - RNA, 20 nt, Artificial Sequence
  C3-targeting RNA guide sequence portion
caagucucuggacuuccaga

SEQ ID NO: 1908 - RNA, 20 nt, Artificial Sequence
  C3-targeting RNA guide sequence portion
caagugcgccggcagucacu

SEQ ID NO: 1909 - RNA, 20 nt, Artificial Sequence
  C3-targeting RNA guide sequence portion
caaucaauuccaaaugcccc

SEQ ID NO: 1910 - RNA, 20 nt, Artificial Sequence
  C3-targeting RNA guide sequence portion
caaucgccuaaacccacaca

SEQ ID NO: 1911 - RNA, 20 nt, Artificial Sequence
  C3-targeting RNA guide sequence portion
caaucuuuaaacccacacug

SEQ ID NO: 1912 - RNA, 20 nt, Artificial Sequence
  C3-targeting RNA guide sequence portion
caaugaacaccacauacacc

SEQ ID NO: 1913 - RNA, 20 nt, Artificial Sequence
  C3-targeting RNA guide sequence portion
caaugccauuaucuucucug

SEQ ID NO: 1914 - RNA, 20 nt, Artificial Sequence
  C3-targeting RNA guide sequence portion
caauuccaaaugccccaacu

SEQ ID NO: 1915 - RNA, 20 nt, Artificial Sequence
  C3-targeting RNA guide sequence portion
caauuccaccauaccuggau

SEQ ID NO: 1916 - RNA, 20 nt, Artificial Sequence
  C3-targeting RNA guide sequence portion
caauuccacgauaccuggau

SEQ ID NO: 1917 - RNA, 20 nt, Artificial Sequence
  C3-targeting RNA guide sequence portion
caauuccaugauaccuggau

SEQ ID NO: 1918 - RNA, 20 nt, Artificial Sequence
  C3-targeting RNA guide sequence portion
caauucuagaaacaucccaa

SEQ ID NO: 1919 - RNA, 20 nt, Artificial Sequence
  C3-targeting RNA guide sequence portion
caauuuucaguguggguuua

SEQ ID NO: 1920 - RNA, 20 nt, Artificial Sequence
  C3-targeting RNA guide sequence portion
cacaaacacccaaaugcacc

SEQ ID NO: 1921 - RNA, 20 nt, Artificial Sequence
  C3-targeting RNA guide sequence portion
cacaaacacccaacccauaa

SEQ ID NO: 1922 - RNA, 20 nt, Artificial Sequence
  C3-targeting RNA guide sequence portion
cacaaacagggcugguucug

SEQ ID NO: 1923 - RNA, 20 nt, Artificial Sequence
  C3-targeting RNA guide sequence portion
cacaaucgccuaaacccaca

SEQ ID NO: 1924 - RNA, 20 nt, Artificial Sequence
  C3-targeting RNA guide sequence portion
cacacagccugccaggcgcu

SEQ ID NO: 1925 - RNA, 20 nt, Artificial Sequence
  C3-targeting RNA guide sequence portion
cacacaucccaccaaacccu

SEQ ID NO: 1926 - RNA, 20 nt, Artificial Sequence
  C3-targeting RNA guide sequence portion
cacacaugccccaaacccua

SEQ ID NO: 1927 - RNA, 20 nt, Artificial Sequence
  C3-targeting RNA guide sequence portion
cacacugaaaauugcaaguc

SEQ ID NO: 1928 - RNA, 20 nt, Artificial Sequence
  C3-targeting RNA guide sequence portion
cacagccugccaggcgcuga

SEQ ID NO: 1929 - RNA, 20 nt, Artificial Sequence
  C3-targeting RNA guide sequence portion
cacaggcagcccaaauauau

SEQ ID NO: 1930 - RNA, 20 nt, Artificial Sequence
  C3-targeting RNA guide sequence portion
cacaggcagcccaaauguau

SEQ ID NO: 1931 - RNA, 20 nt, Artificial Sequence
  C3-targeting RNA guide sequence portion
cacauacacccuaaaccaac

SEQ ID NO: 1932 - RNA, 20 nt, Artificial Sequence
  C3-targeting RNA guide sequence portion
cacauacgccaaaaccucua

SEQ ID NO: 1933 - RNA, 20 nt, Artificial Sequence
  C3-targeting RNA guide sequence portion
cacaucccaccaaacccuga

SEQ ID NO: 1934 - RNA, 20 nt, Artificial Sequence
  C3-targeting RNA guide sequence portion
cacauccguggaaugacaag

SEQ ID NO: 1935 - RNA, 20 nt, Artificial Sequence
  C3-targeting RNA guide sequence portion
cacaugccccaaacccuaaa

SEQ ID NO: 1936 - RNA, 20 nt, Artificial Sequence
  C3-targeting RNA guide sequence portion
cacaugggcaggacagcagc

SEQ ID NO: 1937 - RNA, 20 nt, Artificial Sequence
  C3-targeting RNA guide sequence portion
caccaaacccugaaccuucc

SEQ ID NO: 1938 - RNA, 20 nt, Artificial Sequence
  C3-targeting RNA guide sequence portion
caccacauacacccuaaacc

SEQ ID NO: 1939 - RNA, 20 nt, Artificial Sequence
  C3-targeting RNA guide sequence portion
caccauaccuggauuccaca

SEQ ID NO: 1940 - RNA, 20 nt, Artificial Sequence
  C3-targeting RNA guide sequence portion
caccaucaaugaacaccaca

SEQ ID NO: 1941 - RNA, 20 nt, Artificial Sequence
  C3-targeting RNA guide sequence portion
caccaugacucccacucuca

SEQ ID NO: 1942 - RNA, 20 nt, Artificial Sequence
  C3-targeting RNA guide sequence portion
cacccaaacucucaggcagc

SEQ ID NO: 1943 - RNA, 20 nt, Artificial Sequence
  C3-targeting RNA guide sequence portion
cacccaaaugcacccugaau

SEQ ID NO: 1944 - RNA, 20 nt, Artificial Sequence
  C3-targeting RNA guide sequence portion
cacccaacccauaaacaccc

SEQ ID NO: 1945 - RNA, 20 nt, Artificial Sequence
  C3-targeting RNA guide sequence portion
caccccaaacccagccuaaa

SEQ ID NO: 1946 - RNA, 20 nt, Artificial Sequence
  C3-targeting RNA guide sequence portion
caccccagaaccagcccugu

SEQ ID NO: 1947 - RNA, 20 nt, Artificial Sequence
  C3-targeting RNA guide sequence portion
caccccaguccuaauaaaua

SEQ ID NO: 1948 - RNA, 20 nt, Artificial Sequence
  C3-targeting RNA guide sequence portion
cacccuaaaccaacagauga

SEQ ID NO: 1949 - RNA, 20 nt, Artificial Sequence
  C3-targeting RNA guide sequence portion
cacccucaacucuaccuacc

SEQ ID NO: 1950 - RNA, 20 nt, Artificial Sequence
  C3-targeting RNA guide sequence portion
cacccugaauucuacaggga

SEQ ID NO: 1951 - RNA, 20 nt, Artificial Sequence
  C3-targeting RNA guide sequence portion
caccgucucaaccacauggg

SEQ ID NO: 1952 - RNA, 20 nt, Artificial Sequence
  C3-targeting RNA guide sequence portion
cacgauaccuggauuccaca

SEQ ID NO: 1953 - RNA, 20 nt, Artificial Sequence
  C3-targeting RNA guide sequence portion
cacggaugugagacgccagu

SEQ ID NO: 1954 - RNA, 20 nt, Artificial Sequence
  C3-targeting RNA guide sequence portion
cacgggagugggcuugucau

SEQ ID NO: 1955 - RNA, 20 nt, Artificial Sequence
  C3-targeting RNA guide sequence portion
cacucaaacucccggacacc

SEQ ID NO: 1956 - RNA, 20 nt, Artificial Sequence
  C3-targeting RNA guide sequence portion
cacuccaaauauguaaacac

SEQ ID NO: 1957 - RNA, 20 nt, Artificial Sequence
  C3-targeting RNA guide sequence portion
cacucucagccagcugggcc

SEQ ID NO: 1958 - RNA, 20 nt, Artificial Sequence
  C3-targeting RNA guide sequence portion
cacugaaaauugcaaguccc

SEQ ID NO: 1959 - RNA, 20 nt, Artificial Sequence
  C3-targeting RNA guide sequence portion
cacugccaccgucucaacca

SEQ ID NO: 1960 - RNA, 20 nt, Artificial Sequence
  C3-targeting RNA guide sequence portion
cacuggagucagcgccuggc

SEQ ID NO: 1961 - RNA, 20 nt, Artificial Sequence
  C3-targeting RNA guide sequence portion
cacuggauccucuccaggac

SEQ ID NO: 1962 - RNA, 20 nt, Artificial Sequence
  C3-targeting RNA guide sequence portion
cacuugccaaugccauuauc

SEQ ID NO: 1963 - RNA, 20 nt, Artificial Sequence
  C3-targeting RNA guide sequence portion
cagaaccagcccuguuugug

SEQ ID NO: 1964 - RNA, 20 nt, Artificial Sequence
  C3-targeting RNA guide sequence portion
cagacauuuggggguccagg

SEQ ID NO: 1965 - RNA, 20 nt, Artificial Sequence
  C3-targeting RNA guide sequence portion
cagacccacaaucgccuaaa

SEQ ID NO: 1966 - RNA, 20 nt, Artificial Sequence
  C3-targeting RNA guide sequence portion
cagagaagauaauggcauug

SEQ ID NO: 1967 - RNA, 20 nt, Artificial Sequence
  C3-targeting RNA guide sequence portion
cagagacuuggaggaguugc

SEQ ID NO: 1968 - RNA, 20 nt, Artificial Sequence
  C3-targeting RNA guide sequence portion
cagaggcuggggcacacagc

SEQ ID NO: 1969 - RNA, 20 nt, Artificial Sequence
  C3-targeting RNA guide sequence portion
cagaugaccucaauucuaga

SEQ ID NO: 1970 - RNA, 20 nt, Artificial Sequence
  C3-targeting RNA guide sequence portion
cagcaacuccuccaagucuc

SEQ ID NO: 1971 - RNA, 20 nt, Artificial Sequence
  C3-targeting RNA guide sequence portion
cagcagccaccaugacuccc

SEQ ID NO: 1972 - RNA, 20 nt, Artificial Sequence
  C3-targeting RNA guide sequence portion
cagccaccaugacucccacu

SEQ ID NO: 1973 - RNA, 20 nt, Artificial Sequence
  C3-targeting RNA guide sequence portion
cagccagcugggccuggccu

SEQ ID NO: 1974 - RNA, 20 nt, Artificial Sequence
  C3-targeting RNA guide sequence portion
cagcccaaauauauauaauc

SEQ ID NO: 1975 - RNA, 20 nt, Artificial Sequence
  C3-targeting RNA guide sequence portion
cagcccuguuuguggguaga

SEQ ID NO: 1976 - RNA, 20 nt, Artificial Sequence
  C3-targeting RNA guide sequence portion
cagccuaaaccuccaacacc

SEQ ID NO: 1977 - RNA, 20 nt, Artificial Sequence
  C3-targeting RNA guide sequence portion
cagccucugguccuggagag

SEQ ID NO: 1978 - RNA, 20 nt, Artificial Sequence
  C3-targeting RNA guide sequence portion
cagccugccaggcgcugacu

SEQ ID NO: 1979 - RNA, 20 nt, Artificial Sequence
  C3-targeting RNA guide sequence portion
cagcgccuggcaggcugugu

SEQ ID NO: 1980 - RNA, 20 nt, Artificial Sequence
  C3-targeting RNA guide sequence portion
cagcgucagcaacuccucca

SEQ ID NO: 1981 - RNA, 20 nt, Artificial Sequence
  C3-targeting RNA guide sequence portion
cagcuggcugagagugggag

SEQ ID NO: 1982 - RNA, 20 nt, Artificial Sequence
  C3-targeting RNA guide sequence portion
cagcugggccuggccuuuga

SEQ ID NO: 1983 - RNA, 20 nt, Artificial Sequence
  C3-targeting RNA guide sequence portion
cagcuuggggacuugcaauu

SEQ ID NO: 1984 - RNA, 20 nt, Artificial Sequence
  C3-targeting RNA guide sequence portion
caggacagcagccaccauga

SEQ ID NO: 1985 - RNA, 20 nt, Artificial Sequence
  C3-targeting RNA guide sequence portion
caggaccagaggcuggggca

SEQ ID NO: 1986 - RNA, 20 nt, Artificial Sequence
  C3-targeting RNA guide sequence portion
caggcagcccaaauauauau

SEQ ID NO: 1987 - RNA, 20 nt, Artificial Sequence
  C3-targeting RNA guide sequence portion
caggcccagcuggcugagag

SEQ ID NO: 1988 - RNA, 20 nt, Artificial Sequence
  C3-targeting RNA guide sequence portion
caggcgcugacuccagugag

SEQ ID NO: 1989 - RNA, 20 nt, Artificial Sequence
  C3-targeting RNA guide sequence portion
caggcugugugccccagccu

SEQ ID NO: 1990 - RNA, 20 nt, Artificial Sequence
  C3-targeting RNA guide sequence portion
caggcuuucaaaggccaggc

SEQ ID NO: 1991 - RNA, 20 nt, Artificial Sequence
  C3-targeting RNA guide sequence portion
cagggaccuggacccccaaa

SEQ ID NO: 1992 - RNA, 20 nt, Artificial Sequence
  C3-targeting RNA guide sequence portion
cagggcugguucuggggugg

SEQ ID NO: 1993 - RNA, 20 nt, Artificial Sequence
  C3-targeting RNA guide sequence portion
cagggguuagcagguuggga

SEQ ID NO: 1994 - RNA, 20 nt, Artificial Sequence
  C3-targeting RNA guide sequence portion
cagggugcauuuggguguuu

SEQ ID NO: 1995 - RNA, 20 nt, Artificial Sequence
  C3-targeting RNA guide sequence portion
caggguuuggugggaugugu

SEQ ID NO: 1996 - RNA, 20 nt, Artificial Sequence
  C3-targeting RNA guide sequence portion
cagguaucauggaauuggag

SEQ ID NO: 1997 - RNA, 20 nt, Artificial Sequence
  C3-targeting RNA guide sequence portion
cagguaucguggaauuggag

SEQ ID NO: 1998 - RNA, 20 nt, Artificial Sequence
  C3-targeting RNA guide sequence portion
cagguaugguggaauuggag

SEQ ID NO: 1999 - RNA, 20 nt, Artificial Sequence
  C3-targeting RNA guide sequence portion
caggucccuguagaauucag

SEQ ID NO: 2000 - RNA, 20 nt, Artificial Sequence
  C3-targeting RNA guide sequence portion
cagucacuggauccucucca

SEQ ID NO: 2001 - RNA, 20 nt, Artificial Sequence
  C3-targeting RNA guide sequence portion
caguccuaauaaauacaauc

SEQ ID NO: 2002 - RNA, 20 nt, Artificial Sequence
  C3-targeting RNA guide sequence portion
caguccucacuggagucagc

SEQ ID NO: 2003 - RNA, 20 nt, Artificial Sequence
  C3-targeting RNA guide sequence portion
cagugacugccggcgcacuu

SEQ ID NO: 2004 - RNA, 20 nt, Artificial Sequence
  C3-targeting RNA guide sequence portion
cagugaggacuggcgucuca

SEQ ID NO: 2005 - RNA, 20 nt, Artificial Sequence
  C3-targeting RNA guide sequence portion
cagugcccagagaagauaau

SEQ ID NO: 2006 - RNA, 20 nt, Artificial Sequence
  C3-targeting RNA guide sequence portion
caguguggguuuaaagauug

SEQ ID NO: 2007 - RNA, 20 nt, Artificial Sequence
  C3-targeting RNA guide sequence portion
cauaaacacccaaacucuca

SEQ ID NO: 2008 - RNA, 20 nt, Artificial Sequence
  C3-targeting RNA guide sequence portion
cauacacccuaaaccaacag

SEQ ID NO: 2009 - RNA, 20 nt, Artificial Sequence
  C3-targeting RNA guide sequence portion
cauaccuggauuccacaaac

SEQ ID NO: 2010 - RNA, 20 nt, Artificial Sequence
  C3-targeting RNA guide sequence portion
cauacgccaaaaccucuaaa

SEQ ID NO: 2011 - RNA, 20 nt, Artificial Sequence
  C3-targeting RNA guide sequence portion
cauauuuggaguguuuagag

SEQ ID NO: 2012 - RNA, 20 nt, Artificial Sequence
  C3-targeting RNA guide sequence portion
caucaaugaacaccacauac

SEQ ID NO: 2013 - RNA, 20 nt, Artificial Sequence
  C3-targeting RNA guide sequence portion
caucccaaacuccaauucca

SEQ ID NO: 2014 - RNA, 20 nt, Artificial Sequence
  C3-targeting RNA guide sequence portion
caucccaccaaacccugaac

SEQ ID NO: 2015 - RNA, 20 nt, Artificial Sequence
  C3-targeting RNA guide sequence portion
cauccguggaaugacaagcc

SEQ ID NO: 2016 - RNA, 20 nt, Artificial Sequence
  C3-targeting RNA guide sequence portion
caucuguugguuuagggugu

SEQ ID NO: 2017 - RNA, 20 nt, Artificial Sequence
  C3-targeting RNA guide sequence portion
caugaacccgaaguagccaa

SEQ ID NO: 2018 - RNA, 20 nt, Artificial Sequence
  C3-targeting RNA guide sequence portion
caugacucccacucucagcc

SEQ ID NO: 2019 - RNA, 20 nt, Artificial Sequence
  C3-targeting RNA guide sequence portion
caugauaccuggauuccaca

SEQ ID NO: 2020 - RNA, 20 nt, Artificial Sequence
  C3-targeting RNA guide sequence portion
caugccccaaacccuaaacc

SEQ ID NO: 2021 - RNA, 20 nt, Artificial Sequence
  C3-targeting RNA guide sequence portion
caugggcaggacagcagcca

SEQ ID NO: 2022 - RNA, 20 nt, Artificial Sequence
  C3-targeting RNA guide sequence portion
caugguggcugcuguccugc

SEQ ID NO: 2023 - RNA, 20 nt, Artificial Sequence
  C3-targeting RNA guide sequence portion
cauguauaguuggggcauuu

SEQ ID NO: 2024 - RNA, 20 nt, Artificial Sequence
  C3-targeting RNA guide sequence portion
caugugguugagacgguggc

SEQ ID NO: 2025 - RNA, 20 nt, Artificial Sequence
  C3-targeting RNA guide sequence portion
cauguguggguuuaggcgau

SEQ ID NO: 2026 - RNA, 20 nt, Artificial Sequence
  C3-targeting RNA guide sequence portion
cauuaucuucucugggcacu

SEQ ID NO: 2027 - RNA, 20 nt, Artificial Sequence
  C3-targeting RNA guide sequence portion
cauuccacggaugugagacg

SEQ ID NO: 2028 - RNA, 20 nt, Artificial Sequence
  C3-targeting RNA guide sequence portion
cauucccaaccugcuaaccc

SEQ ID NO: 2029 - RNA, 20 nt, Artificial Sequence
  C3-targeting RNA guide sequence portion
cauuggcaagugcgccggca

SEQ ID NO: 2030 - RNA, 20 nt, Artificial Sequence
  C3-targeting RNA guide sequence portion
cauuugggcugccugagagu

SEQ ID NO: 2031 - RNA, 20 nt, Artificial Sequence
  C3-targeting RNA guide sequence portion
cauuugggcugccugugagu

SEQ ID NO: 2032 - RNA, 20 nt, Artificial Sequence
  C3-targeting RNA guide sequence portion
cauuuggggguccagguccc

SEQ ID NO: 2033 - RNA, 20 nt, Artificial Sequence
  C3-targeting RNA guide sequence portion
cauuuggguguuuguggauu

SEQ ID NO: 2034 - RNA, 20 nt, Artificial Sequence
  C3-targeting RNA guide sequence portion
ccaaaaccucuaaaccucaa

SEQ ID NO: 2035 - RNA, 20 nt, Artificial Sequence
  C3-targeting RNA guide sequence portion
ccaaacccacauacgccaaa

SEQ ID NO: 2036 - RNA, 20 nt, Artificial Sequence
  C3-targeting RNA guide sequence portion
ccaaacccagccuaaaccuc

SEQ ID NO: 2037 - RNA, 20 nt, Artificial Sequence
  C3-targeting RNA guide sequence portion
ccaaacccuaaaccucuacc

SEQ ID NO: 2038 - RNA, 20 nt, Artificial Sequence
  C3-targeting RNA guide sequence portion
ccaaacccugaaccuuccaa

SEQ ID NO: 2039 - RNA, 20 nt, Artificial Sequence
  C3-targeting RNA guide sequence portion
ccaaacucacaggcagccca

SEQ ID NO: 2040 - RNA, 20 nt, Artificial Sequence
  C3-targeting RNA guide sequence portion
ccaaacuccaauuccaccau

SEQ ID NO: 2041 - RNA, 20 nt, Artificial Sequence
  C3-targeting RNA guide sequence portion
ccaaacucucaggcagccca

SEQ ID NO: 2042 - RNA, 20 nt, Artificial Sequence
  C3-targeting RNA guide sequence portion
ccaaauauauauaaucauuc

SEQ ID NO: 2043 - RNA, 20 nt, Artificial Sequence
  C3-targeting RNA guide sequence portion
ccaaauauguaaacacucaa

SEQ ID NO: 2044 - RNA, 20 nt, Artificial Sequence
  C3-targeting RNA guide sequence portion
ccaaaucuuguaaaguccaa

SEQ ID NO: 2045 - RNA, 20 nt, Artificial Sequence
  C3-targeting RNA guide sequence portion
ccaaaugcacccugaauucu

SEQ ID NO: 2046 - RNA, 20 nt, Artificial Sequence
  C3-targeting RNA guide sequence portion
ccaaaugccccaacuauaca

SEQ ID NO: 2047 - RNA, 20 nt, Artificial Sequence
  C3-targeting RNA guide sequence portion
ccaacaccccaguccuaaua

SEQ ID NO: 2048 - RNA, 20 nt, Artificial Sequence
  C3-targeting RNA guide sequence portion
ccaacagaugaccucaauuc

SEQ ID NO: 2049 - RNA, 20 nt, Artificial Sequence
  C3-targeting RNA guide sequence portion
ccaaccagcgucagcaacuc

SEQ ID NO: 2050 - RNA, 20 nt, Artificial Sequence
  C3-targeting RNA guide sequence portion
ccaacccauaaacacccaaa

SEQ ID NO: 2051 - RNA, 20 nt, Artificial Sequence
  C3-targeting RNA guide sequence portion
ccaaccgcaccaucaaugaa

SEQ ID NO: 2052 - RNA, 20 nt, Artificial Sequence
  C3-targeting RNA guide sequence portion
ccaaccugcuaaccccugaa

SEQ ID NO: 2053 - RNA, 20 nt, Artificial Sequence
  C3-targeting RNA guide sequence portion
ccaacuauacaugaacccga

SEQ ID NO: 2054 - RNA, 20 nt, Artificial Sequence
  C3-targeting RNA guide sequence portion
ccaagcugcaaacucccaaa

SEQ ID NO: 2055 - RNA, 20 nt, Artificial Sequence
  C3-targeting RNA guide sequence portion
ccaagucucuggacuuccag

SEQ ID NO: 2056 - RNA, 20 nt, Artificial Sequence
  C3-targeting RNA guide sequence portion
ccaaucuuuaaacccacacu

SEQ ID NO: 2057 - RNA, 20 nt, Artificial Sequence
  C3-targeting RNA guide sequence portion
ccaaugccauuaucuucucu

SEQ ID NO: 2058 - RNA, 20 nt, Artificial Sequence
  C3-targeting RNA guide sequence portion
ccaauuccaccauaccugga

SEQ ID NO: 2059 - RNA, 20 nt, Artificial Sequence
  C3-targeting RNA guide sequence portion
ccaauuccacgauaccugga

SEQ ID NO: 2060 - RNA, 20 nt, Artificial Sequence
  C3-targeting RNA guide sequence portion
ccaauuccaugauaccugga

SEQ ID NO: 2061 - RNA, 20 nt, Artificial Sequence
  C3-targeting RNA guide sequence portion
ccacaaacacccaaaugcac

SEQ ID NO: 2062 - RNA, 20 nt, Artificial Sequence
  C3-targeting RNA guide sequence portion
ccacaaacacccaacccaua

SEQ ID NO: 2063 - RNA, 20 nt, Artificial Sequence
  C3-targeting RNA guide sequence portion
ccacaaacagggcugguucu

SEQ ID NO: 2064 - RNA, 20 nt, Artificial Sequence
  C3-targeting RNA guide sequence portion
ccacaaucgccuaaacccac

SEQ ID NO: 2065 - RNA, 20 nt, Artificial Sequence
  C3-targeting RNA guide sequence portion
ccacacaucccaccaaaccc

SEQ ID NO: 2066 - RNA, 20 nt, Artificial Sequence
  C3-targeting RNA guide sequence portion
ccacacaugccccaaacccu

SEQ ID NO: 2067 - RNA, 20 nt, Artificial Sequence
  C3-targeting RNA guide sequence portion
ccacacugaaaauugcaagu

SEQ ID NO: 2068 - RNA, 20 nt, Artificial Sequence
  C3-targeting RNA guide sequence portion
ccacauacacccuaaaccaa

SEQ ID NO: 2069 - RNA, 20 nt, Artificial Sequence
  C3-targeting RNA guide sequence portion
ccacauacgccaaaaccucu

SEQ ID NO: 2070 - RNA, 20 nt, Artificial Sequence
  C3-targeting RNA guide sequence portion
ccacaugggcaggacagcag

SEQ ID NO: 2071 - RNA, 20 nt, Artificial Sequence
  C3-targeting RNA guide sequence portion
ccaccaaacccugaaccuuc

SEQ ID NO: 2072 - RNA, 20 nt, Artificial Sequence
  C3-targeting RNA guide sequence portion
ccaccauaccuggauuccac

SEQ ID NO: 2073 - RNA, 20 nt, Artificial Sequence
  C3-targeting RNA guide sequence portion
ccaccaugacucccacucuc

SEQ ID NO: 2074 - RNA, 20 nt, Artificial Sequence
  C3-targeting RNA guide sequence portion
ccaccccagaaccagcccug

SEQ ID NO: 2075 - RNA, 20 nt, Artificial Sequence
  C3-targeting RNA guide sequence portion
ccaccgucucaaccacaugg

SEQ ID NO: 2076 - RNA, 20 nt, Artificial Sequence
  C3-targeting RNA guide sequence portion
ccacgauaccuggauuccac

SEQ ID NO: 2077 - RNA, 20 nt, Artificial Sequence
  C3-targeting RNA guide sequence portion
ccacggaugugagacgccag

SEQ ID NO: 2078 - RNA, 20 nt, Artificial Sequence
  C3-targeting RNA guide sequence portion
ccacucucagccagcugggc

SEQ ID NO: 2079 - RNA, 20 nt, Artificial Sequence
  C3-targeting RNA guide sequence portion
ccagaaccagcccuguuugu

SEQ ID NO: 2080 - RNA, 20 nt, Artificial Sequence
  C3-targeting RNA guide sequence portion
ccagacccacaaucgccuaa

SEQ ID NO: 2081 - RNA, 20 nt, Artificial Sequence
  C3-targeting RNA guide sequence portion
ccagagaagauaauggcauu

SEQ ID NO: 2082 - RNA, 20 nt, Artificial Sequence
  C3-targeting RNA guide sequence portion
ccagagacuuggaggaguug

SEQ ID NO: 2083 - RNA, 20 nt, Artificial Sequence
  C3-targeting RNA guide sequence portion
ccagaggcuggggcacacag

SEQ ID NO: 2084 - RNA, 20 nt, Artificial Sequence
  C3-targeting RNA guide sequence portion
ccagcccuguuuguggguag

SEQ ID NO: 2085 - RNA, 20 nt, Artificial Sequence
  C3-targeting RNA guide sequence portion
ccagccuaaaccuccaacac

SEQ ID NO: 2086 - RNA, 20 nt, Artificial Sequence
  C3-targeting RNA guide sequence portion
ccagccucugguccuggaga

SEQ ID NO: 2087 - RNA, 20 nt, Artificial Sequence
  C3-targeting RNA guide sequence portion
ccagcgucagcaacuccucc

SEQ ID NO: 2088 - RNA, 20 nt, Artificial Sequence
  C3-targeting RNA guide sequence portion
ccagcuggcugagaguggga

SEQ ID NO: 2089 - RNA, 20 nt, Artificial Sequence
  C3-targeting RNA guide sequence portion
ccagcugggccuggccuuug

SEQ ID NO: 2090 - RNA, 20 nt, Artificial Sequence
  C3-targeting RNA guide sequence portion
ccaggaccagaggcuggggc

SEQ ID NO: 2091 - RNA, 20 nt, Artificial Sequence
  C3-targeting RNA guide sequence portion
ccaggcccagcuggcugaga

SEQ ID NO: 2092 - RNA, 20 nt, Artificial Sequence
  C3-targeting RNA guide sequence portion
ccaggcgcugacuccaguga

SEQ ID NO: 2093 - RNA, 20 nt, Artificial Sequence
  C3-targeting RNA guide sequence portion
ccaggcuuucaaaggccagg

SEQ ID NO: 2094 - RNA, 20 nt, Artificial Sequence
  C3-targeting RNA guide sequence portion
ccagguaucauggaauugga

SEQ ID NO: 2095 - RNA, 20 nt, Artificial Sequence
  C3-targeting RNA guide sequence portion
ccagguaucguggaauugga

SEQ ID NO: 2096 - RNA, 20 nt, Artificial Sequence
  C3-targeting RNA guide sequence portion
ccagguaugguggaauugga

SEQ ID NO: 2097 - RNA, 20 nt, Artificial Sequence
  C3-targeting RNA guide sequence portion
ccaggucccuguagaauuca

SEQ ID NO: 2098 - RNA, 20 nt, Artificial Sequence
  C3-targeting RNA guide sequence portion
ccaguccuaauaaauacaau

SEQ ID NO: 2099 - RNA, 20 nt, Artificial Sequence
  C3-targeting RNA guide sequence portion
ccaguccucacuggagucag

SEQ ID NO: 2100 - RNA, 20 nt, Artificial Sequence
  C3-targeting RNA guide sequence portion
ccagugacugccggcgcacu

SEQ ID NO: 2101 - RNA, 20 nt, Artificial Sequence
  C3-targeting RNA guide sequence portion
ccagugaggacuggcgucuc

SEQ ID NO: 2102 - RNA, 20 nt, Artificial Sequence
  C3-targeting RNA guide sequence portion
ccauaaacacccaaacucuc

SEQ ID NO: 2103 - RNA, 20 nt, Artificial Sequence
  C3-targeting RNA guide sequence portion
ccauaccuggauuccacaaa

SEQ ID NO: 2104 - RNA, 20 nt, Artificial Sequence
  C3-targeting RNA guide sequence portion
ccaucaaugaacaccacaua

SEQ ID NO: 2105 - RNA, 20 nt, Artificial Sequence
  C3-targeting RNA guide sequence portion
ccaugacucccacucucagc

SEQ ID NO: 2106 - RNA, 20 nt, Artificial Sequence
  C3-targeting RNA guide sequence portion
ccaugauaccuggauuccac

SEQ ID NO: 2107 - RNA, 20 nt, Artificial Sequence
  C3-targeting RNA guide sequence portion
ccaugugguugagacggugg

SEQ ID NO: 2108 - RNA, 20 nt, Artificial Sequence
  C3-targeting RNA guide sequence portion
ccauuaucuucucugggcac

SEQ ID NO: 2109 - RNA, 20 nt, Artificial Sequence
  C3-targeting RNA guide sequence portion
cccaaacccacauacgccaa

SEQ ID NO: 2110 - RNA, 20 nt, Artificial Sequence
  C3-targeting RNA guide sequence portion
cccaaacccagccuaaaccu

SEQ ID NO: 2111 - RNA, 20 nt, Artificial Sequence
  C3-targeting RNA guide sequence portion
cccaaacccuaaaccucuac

SEQ ID NO: 2112 - RNA, 20 nt, Artificial Sequence
  C3-targeting RNA guide sequence portion
cccaaacucacaggcagccc

SEQ ID NO: 2113 - RNA, 20 nt, Artificial Sequence
  C3-targeting RNA guide sequence portion
cccaaacuccaauuccacca

SEQ ID NO: 2114 - RNA, 20 nt, Artificial Sequence
  C3-targeting RNA guide sequence portion
cccaaacucucaggcagccc

SEQ ID NO: 2115 - RNA, 20 nt, Artificial Sequence
  C3-targeting RNA guide sequence portion
cccaaauauauauaaucauu

SEQ ID NO: 2116 - RNA, 20 nt, Artificial Sequence
  C3-targeting RNA guide sequence portion
cccaaaucuuguaaagucca

SEQ ID NO: 2117 - RNA, 20 nt, Artificial Sequence
  C3-targeting RNA guide sequence portion
cccaaaugcacccugaauuc

SEQ ID NO: 2118 - RNA, 20 nt, Artificial Sequence
  C3-targeting RNA guide sequence portion
cccaaaugucugcuuccacc

SEQ ID NO: 2119 - RNA, 20 nt, Artificial Sequence
  C3-targeting RNA guide sequence portion
cccaacccauaaacacccaa

SEQ ID NO: 2120 - RNA, 20 nt, Artificial Sequence
  C3-targeting RNA guide sequence portion
cccaaccgcaccaucaauga

SEQ ID NO: 2121 - RNA, 20 nt, Artificial Sequence
  C3-targeting RNA guide sequence portion
cccaaccugcuaaccccuga

SEQ ID NO: 2122 - RNA, 20 nt, Artificial Sequence
  C3-targeting RNA guide sequence portion
cccaacuauacaugaacccg

SEQ ID NO: 2123 - RNA, 20 nt, Artificial Sequence
  C3-targeting RNA guide sequence portion
cccaagcugcaaacucccaa

SEQ ID NO: 2124 - RNA, 20 nt, Artificial Sequence
  C3-targeting RNA guide sequence portion
cccacaaacagggcugguuc

SEQ ID NO: 2125 - RNA, 20 nt, Artificial Sequence
  C3-targeting RNA guide sequence portion
cccacaaucgccuaaaccca

SEQ ID NO: 2126 - RNA, 20 nt, Artificial Sequence
  C3-targeting RNA guide sequence portion
cccacacaugccccaaaccc

SEQ ID NO: 2127 - RNA, 20 nt, Artificial Sequence
  C3-targeting RNA guide sequence portion
cccacacugaaaauugcaag

SEQ ID NO: 2128 - RNA, 20 nt, Artificial Sequence
  C3-targeting RNA guide sequence portion
cccacauacgccaaaaccuc

SEQ ID NO: 2129 - RNA, 20 nt, Artificial Sequence
  C3-targeting RNA guide sequence portion
cccaccaaacccugaaccuu

SEQ ID NO: 2130 - RNA, 20 nt, Artificial Sequence
  C3-targeting RNA guide sequence portion
cccacucccgugccccacuc

SEQ ID NO: 2131 - RNA, 20 nt, Artificial Sequence
  C3-targeting RNA guide sequence portion
cccacucucagccagcuggg

SEQ ID NO: 2132 - RNA, 20 nt, Artificial Sequence
  C3-targeting RNA guide sequence portion
cccagaaccagcccuguuug

SEQ ID NO: 2133 - RNA, 20 nt, Artificial Sequence
  C3-targeting RNA guide sequence portion
cccagagaagauaauggcau

SEQ ID NO: 2134 - RNA, 20 nt, Artificial Sequence
  C3-targeting RNA guide sequence portion
cccagccuaaaccuccaaca

SEQ ID NO: 2135 - RNA, 20 nt, Artificial Sequence
  C3-targeting RNA guide sequence portion
cccagccucugguccuggag

SEQ ID NO: 2136 - RNA, 20 nt, Artificial Sequence
  C3-targeting RNA guide sequence portion
cccagcuggcugagaguggg

SEQ ID NO: 2137 - RNA, 20 nt, Artificial Sequence
  C3-targeting RNA guide sequence portion
cccaggcuuucaaaggccag

SEQ ID NO: 2138 - RNA, 20 nt, Artificial Sequence
  C3-targeting RNA guide sequence portion
cccaguccuaauaaauacaa

SEQ ID NO: 2139 - RNA, 20 nt, Artificial Sequence
  C3-targeting RNA guide sequence portion
cccauaaacacccaaacucu

SEQ ID NO: 2140 - RNA, 20 nt, Artificial Sequence
  C3-targeting RNA guide sequence portion
cccaugugguugagacggug

SEQ ID NO: 2141 - RNA, 20 nt, Artificial Sequence
  C3-targeting RNA guide sequence portion
ccccaaacccagccuaaacc

SEQ ID NO: 2142 - RNA, 20 nt, Artificial Sequence
  C3-targeting RNA guide sequence portion
ccccaaacccuaaaccucua

SEQ ID NO: 2143 - RNA, 20 nt, Artificial Sequence
  C3-targeting RNA guide sequence portion
ccccaaaugucugcuuccac

SEQ ID NO: 2144 - RNA, 20 nt, Artificial Sequence
  C3-targeting RNA guide sequence portion
ccccaaccgcaccaucaaug

SEQ ID NO: 2145 - RNA, 20 nt, Artificial Sequence
  C3-targeting RNA guide sequence portion
ccccaacuauacaugaaccc

SEQ ID NO: 2146 - RNA, 20 nt, Artificial Sequence
  C3-targeting RNA guide sequence portion
ccccaagcugcaaacuccca

SEQ ID NO: 2147 - RNA, 20 nt, Artificial Sequence
  C3-targeting RNA guide sequence portion
ccccagaaccagcccuguuu

SEQ ID NO: 2148 - RNA, 20 nt, Artificial Sequence
  C3-targeting RNA guide sequence portion
ccccagccucugguccugga

SEQ ID NO: 2149 - RNA, 20 nt, Artificial Sequence
  C3-targeting RNA guide sequence portion
ccccaguccuaauaaauaca

SEQ ID NO: 2150 - RNA, 20 nt, Artificial Sequence
  C3-targeting RNA guide sequence portion
cccccaaaugucugcuucca

SEQ ID NO: 2151 - RNA, 20 nt, Artificial Sequence
  C3-targeting RNA guide sequence portion
cccccaaccgcaccaucaau

SEQ ID NO: 2152 - RNA, 20 nt, Artificial Sequence
  C3-targeting RNA guide sequence portion
cccccucguugcccaggcuu

SEQ ID NO: 2153 - RNA, 20 nt, Artificial Sequence
  C3-targeting RNA guide sequence portion
ccccucguugcccaggcuuu

SEQ ID NO: 2154 - RNA, 20 nt, Artificial Sequence
  C3-targeting RNA guide sequence portion
ccccugaauccacaaacacc

SEQ ID NO: 2155 - RNA, 20 nt, Artificial Sequence
  C3-targeting RNA guide sequence portion
cccgaaguagccaaucuuua

SEQ ID NO: 2156 - RNA, 20 nt, Artificial Sequence
  C3-targeting RNA guide sequence portion
cccggacacccucaacucua

SEQ ID NO: 2157 - RNA, 20 nt, Artificial Sequence
  C3-targeting RNA guide sequence portion
cccuaaaccaacagaugacc

SEQ ID NO: 2158 - RNA, 20 nt, Artificial Sequence
  C3-targeting RNA guide sequence portion
cccuaaaccucuaccucucu

SEQ ID NO: 2159 - RNA, 20 nt, Artificial Sequence
  C3-targeting RNA guide sequence portion
cccucaacucuaccuaccca

SEQ ID NO: 2160 - RNA, 20 nt, Artificial Sequence
  C3-targeting RNA guide sequence portion
cccucguugcccaggcuuuc

SEQ ID NO: 2161 - RNA, 20 nt, Artificial Sequence
  C3-targeting RNA guide sequence portion
cccugaaccuuccaaccagc

SEQ ID NO: 2162 - RNA, 20 nt, Artificial Sequence
  C3-targeting RNA guide sequence portion
cccugaauccacaaacaccc

SEQ ID NO: 2163 - RNA, 20 nt, Artificial Sequence
  C3-targeting RNA guide sequence portion
cccugaauucuacagggacc

SEQ ID NO: 2164 - RNA, 20 nt, Artificial Sequence
  C3-targeting RNA guide sequence portion
cccuguagaauucagggugc

SEQ ID NO: 2165 - RNA, 20 nt, Artificial Sequence
  C3-targeting RNA guide sequence portion
cccuguuuguggguagaguc

SEQ ID NO: 2166 - RNA, 20 nt, Artificial Sequence
  C3-targeting RNA guide sequence portion
ccgaaguagccaaucuuuaa

SEQ ID NO: 2167 - RNA, 20 nt, Artificial Sequence
  C3-targeting RNA guide sequence portion
ccgcaccaucaaugaacacc

SEQ ID NO: 2168 - RNA, 20 nt, Artificial Sequence
  C3-targeting RNA guide sequence portion
ccggacacccucaacucuac

SEQ ID NO: 2169 - RNA, 20 nt, Artificial Sequence
  C3-targeting RNA guide sequence portion
ccggcagucacuggauccuc

SEQ ID NO: 2170 - RNA, 20 nt, Artificial Sequence
  C3-targeting RNA guide sequence portion
ccggcgcacuugccaaugcc

SEQ ID NO: 2171 - RNA, 20 nt, Artificial Sequence
  C3-targeting RNA guide sequence portion
ccgggaguuugaguguuuac

SEQ ID NO: 2172 - RNA, 20 nt, Artificial Sequence
  C3-targeting RNA guide sequence portion
ccgucucaaccacaugggca

SEQ ID NO: 2173 - RNA, 20 nt, Artificial Sequence
  C3-targeting RNA guide sequence portion
ccguggaaugacaagcccac

SEQ ID NO: 2174 - RNA, 20 nt, Artificial Sequence
  C3-targeting RNA guide sequence portion
ccuaaaccaacagaugaccu

SEQ ID NO: 2175 - RNA, 20 nt, Artificial Sequence
  C3-targeting RNA guide sequence portion
ccuaaacccacacaugcccc

SEQ ID NO: 2176 - RNA, 20 nt, Artificial Sequence
  C3-targeting RNA guide sequence portion
ccuaaaccuccaacacccca

SEQ ID NO: 2177 - RNA, 20 nt, Artificial Sequence
  C3-targeting RNA guide sequence portion
ccuaaaccucuaccucucua

SEQ ID NO: 2178 - RNA, 20 nt, Artificial Sequence
  C3-targeting RNA guide sequence portion
ccuacccaaacccacauacg

SEQ ID NO: 2179 - RNA, 20 nt, Artificial Sequence
  C3-targeting RNA guide sequence portion
ccucaaaucuuagagcaccc

SEQ ID NO: 2180 - RNA, 20 nt, Artificial Sequence
  C3-targeting RNA guide sequence portion
ccucaacucuaccuacccaa

SEQ ID NO: 2181 - RNA, 20 nt, Artificial Sequence
  C3-targeting RNA guide sequence portion
ccucaauucuagaaacaucc

SEQ ID NO: 2182 - RNA, 20 nt, Artificial Sequence
  C3-targeting RNA guide sequence portion
ccucacuggagucagcgccu

SEQ ID NO: 2183 - RNA, 20 nt, Artificial Sequence
  C3-targeting RNA guide sequence portion
ccuccaacaccccaguccua

SEQ ID NO: 2184 - RNA, 20 nt, Artificial Sequence
  C3-targeting RNA guide sequence portion
ccuccaagucucuggacuuc

SEQ ID NO: 2185 - RNA, 20 nt, Artificial Sequence
  C3-targeting RNA guide sequence portion
ccucguugcccaggcuuuca

SEQ ID NO: 2186 - RNA, 20 nt, Artificial Sequence
  C3-targeting RNA guide sequence portion
ccucuaaaccucaaaucuua

SEQ ID NO: 2187 - RNA, 20 nt, Artificial Sequence
  C3-targeting RNA guide sequence portion
ccucuaccucucuaaacacu

SEQ ID NO: 2188 - RNA, 20 nt, Artificial Sequence
  C3-targeting RNA guide sequence portion
ccucuccaggaccagaggcu

SEQ ID NO: 2189 - RNA, 20 nt, Artificial Sequence
  C3-targeting RNA guide sequence portion
ccucucuaaacacuccaaau

SEQ ID NO: 2190 - RNA, 20 nt, Artificial Sequence
  C3-targeting RNA guide sequence portion
ccucugguccuggagaggau

SEQ ID NO: 2191 - RNA, 20 nt, Artificial Sequence
  C3-targeting RNA guide sequence portion
ccugaaccuuccaaccagcg

SEQ ID NO: 2192 - RNA, 20 nt, Artificial Sequence
  C3-targeting RNA guide sequence portion
ccugaauccacaaacaccca

SEQ ID NO: 2193 - RNA, 20 nt, Artificial Sequence
  C3-targeting RNA guide sequence portion
ccugaauucuacagggaccu

SEQ ID NO: 2194 - RNA, 20 nt, Artificial Sequence
  C3-targeting RNA guide sequence portion
ccugagaguuuggguguuua

SEQ ID NO: 2195 - RNA, 20 nt, Artificial Sequence
  C3-targeting RNA guide sequence portion
ccugccaggcgcugacucca

SEQ ID NO: 2196 - RNA, 20 nt, Artificial Sequence
  C3-targeting RNA guide sequence portion
ccugcccaugugguugagac

SEQ ID NO: 2197 - RNA, 20 nt, Artificial Sequence
  C3-targeting RNA guide sequence portion
ccugcuaaccccugaaucca

SEQ ID NO: 2198 - RNA, 20 nt, Artificial Sequence
  C3-targeting RNA guide sequence portion
ccuggacccccaaaugucug

SEQ ID NO: 2199 - RNA, 20 nt, Artificial Sequence
  C3-targeting RNA guide sequence portion
ccuggagaggauccagugac

SEQ ID NO: 2200 - RNA, 20 nt, Artificial Sequence
  C3-targeting RNA guide sequence portion
ccuggauuccacaaacaccc

SEQ ID NO: 2201 - RNA, 20 nt, Artificial Sequence
  C3-targeting RNA guide sequence portion
ccuggcaggcugugugcccc

SEQ ID NO: 2202 - RNA, 20 nt, Artificial Sequence
  C3-targeting RNA guide sequence portion
ccuggccuuugaaagccugg

SEQ ID NO: 2203 - RNA, 20 nt, Artificial Sequence
  C3-targeting RNA guide sequence portion
ccugggcaacgagggggcca

SEQ ID NO: 2204 - RNA, 20 nt, Artificial Sequence
  C3-targeting RNA guide sequence portion
ccuguagaauucagggugca

SEQ ID NO: 2205 - RNA, 20 nt, Artificial Sequence
  C3-targeting RNA guide sequence portion
ccuguuuguggguagaguca

SEQ ID NO: 2206 - RNA, 20 nt, Artificial Sequence
  C3-targeting RNA guide sequence portion
ccuuccaaccagcgucagca

SEQ ID NO: 2207 - RNA, 20 nt, Artificial Sequence
  C3-targeting RNA guide sequence portion
ccuuugaaagccugggcaac

SEQ ID NO: 2208 - RNA, 20 nt, Artificial Sequence
  C3-targeting RNA guide sequence portion
cgaaguagccaaucuuuaaa

SEQ ID NO: 2209 - RNA, 20 nt, Artificial Sequence
  C3-targeting RNA guide sequence portion
cgagggggccacacauccca

SEQ ID NO: 2210 - RNA, 20 nt, Artificial Sequence
  C3-targeting RNA guide sequence portion
cgauaccuggauuccacaaa

SEQ ID NO: 2211 - RNA, 20 nt, Artificial Sequence
  C3-targeting RNA guide sequence portion
cgauugugggucuggaaguc

SEQ ID NO: 2212 - RNA, 20 nt, Artificial Sequence
  C3-targeting RNA guide sequence portion
cgcaccaucaaugaacacca

SEQ ID NO: 2213 - RNA, 20 nt, Artificial Sequence
  C3-targeting RNA guide sequence portion
cgcacuugccaaugccauua

SEQ ID NO: 2214 - RNA, 20 nt, Artificial Sequence
  C3-targeting RNA guide sequence portion
cgccaaaaccucuaaaccuc

SEQ ID NO: 2215 - RNA, 20 nt, Artificial Sequence
  C3-targeting RNA guide sequence portion
cgccaguccucacuggaguc

SEQ ID NO: 2216 - RNA, 20 nt, Artificial Sequence
  C3-targeting RNA guide sequence portion
cgccggcagucacuggaucc

SEQ ID NO: 2217 - RNA, 20 nt, Artificial Sequence
  C3-targeting RNA guide sequence portion
cgccuaaacccacacaugcc

SEQ ID NO: 2218 - RNA, 20 nt, Artificial Sequence
  C3-targeting RNA guide sequence portion
cgccuggcaggcugugugcc

SEQ ID NO: 2219 - RNA, 20 nt, Artificial Sequence
  C3-targeting RNA guide sequence portion
cgcugacuccagugaggacu

SEQ ID NO: 2220 - RNA, 20 nt, Artificial Sequence
  C3-targeting RNA guide sequence portion
cgcugguuggaagguucagg

SEQ ID NO: 2221 - RNA, 20 nt, Artificial Sequence
  C3-targeting RNA guide sequence portion
cggacacccucaacucuacc

SEQ ID NO: 2222 - RNA, 20 nt, Artificial Sequence
  C3-targeting RNA guide sequence portion
cggagguuuggacuuuacaa

SEQ ID NO: 2223 - RNA, 20 nt, Artificial Sequence
  C3-targeting RNA guide sequence portion
cggaguggggcacgggagug

SEQ ID NO: 2224 - RNA, 20 nt, Artificial Sequence
  C3-targeting RNA guide sequence portion
cggaugugagacgccagucc

SEQ ID NO: 2225 - RNA, 20 nt, Artificial Sequence
  C3-targeting RNA guide sequence portion
cggcagucacuggauccucu

SEQ ID NO: 2226 - RNA, 20 nt, Artificial Sequence
  C3-targeting RNA guide sequence portion
cggcgcacuugccaaugcca

SEQ ID NO: 2227 - RNA, 20 nt, Artificial Sequence
  C3-targeting RNA guide sequence portion
cgggagugggcuugucauuc

SEQ ID NO: 2228 - RNA, 20 nt, Artificial Sequence
  C3-targeting RNA guide sequence portion
cgggaguuugaguguuuaca

SEQ ID NO: 2229 - RNA, 20 nt, Artificial Sequence
  C3-targeting RNA guide sequence portion
cggguucauguauaguuggg

SEQ ID NO: 2230 - RNA, 20 nt, Artificial Sequence
  C3-targeting RNA guide sequence portion
cgguggcagugcccagagaa

SEQ ID NO: 2231 - RNA, 20 nt, Artificial Sequence
  C3-targeting RNA guide sequence portion
cguauguggguuuggguagg

SEQ ID NO: 2232 - RNA, 20 nt, Artificial Sequence
  C3-targeting RNA guide sequence portion
cgucagcaacuccuccaagu

SEQ ID NO: 2233 - RNA, 20 nt, Artificial Sequence
  C3-targeting RNA guide sequence portion
cgucucaaccacaugggcag

SEQ ID NO: 2234 - RNA, 20 nt, Artificial Sequence
  C3-targeting RNA guide sequence portion
cgucucacauccguggaaug

SEQ ID NO: 2235 - RNA, 20 nt, Artificial Sequence
  C3-targeting RNA guide sequence portion
cguggaaugacaagcccacu

SEQ ID NO: 2236 - RNA, 20 nt, Artificial Sequence
  C3-targeting RNA guide sequence portion
cguggaauuggaguuuauau

SEQ ID NO: 2237 - RNA, 20 nt, Artificial Sequence
  C3-targeting RNA guide sequence portion
cguugcccaggcuuucaaag

SEQ ID NO: 2238 - RNA, 20 nt, Artificial Sequence
  C3-targeting RNA guide sequence portion
cuaaacacuccaaauaugua

SEQ ID NO: 2239 - RNA, 20 nt, Artificial Sequence
  C3-targeting RNA guide sequence portion
cuaaaccaacagaugaccuc

SEQ ID NO: 2240 - RNA, 20 nt, Artificial Sequence
  C3-targeting RNA guide sequence portion
cuaaacccacacaugcccca

SEQ ID NO: 2241 - RNA, 20 nt, Artificial Sequence
  C3-targeting RNA guide sequence portion
cuaaaccucaaaucuuagag

SEQ ID NO: 2242 - RNA, 20 nt, Artificial Sequence
  C3-targeting RNA guide sequence portion
cuaaaccuccaacaccccag

SEQ ID NO: 2243 - RNA, 20 nt, Artificial Sequence
  C3-targeting RNA guide sequence portion
cuaaaccucuaccucucuaa

SEQ ID NO: 2244 - RNA, 20 nt, Artificial Sequence
  C3-targeting RNA guide sequence portion
cuaaccccugaauccacaaa

SEQ ID NO: 2245 - RNA, 20 nt, Artificial Sequence
  C3-targeting RNA guide sequence portion
cuaagauuugagguuuagag

SEQ ID NO: 2246 - RNA, 20 nt, Artificial Sequence
  C3-targeting RNA guide sequence portion
cuacagggaccuggaccccc

SEQ ID NO: 2247 - RNA, 20 nt, Artificial Sequence
  C3-targeting RNA guide sequence portion
cuacccaaacccacauacgc

SEQ ID NO: 2248 - RNA, 20 nt, Artificial Sequence
  C3-targeting RNA guide sequence portion
cuacccacaaacagggcugg

SEQ ID NO: 2249 - RNA, 20 nt, Artificial Sequence
  C3-targeting RNA guide sequence portion
cuaccuacccaaacccacau

SEQ ID NO: 2250 - RNA, 20 nt, Artificial Sequence
  C3-targeting RNA guide sequence portion
cuaccucucuaaacacucca

SEQ ID NO: 2251 - RNA, 20 nt, Artificial Sequence
  C3-targeting RNA guide sequence portion
cuacuucggguucauguaua

SEQ ID NO: 2252 - RNA, 20 nt, Artificial Sequence
  C3-targeting RNA guide sequence portion
cuagaaacaucccaaacucc

SEQ ID NO: 2253 - RNA, 20 nt, Artificial Sequence
  C3-targeting RNA guide sequence portion
cuagaauugaggucaucugu

SEQ ID NO: 2254 - RNA, 20 nt, Artificial Sequence
  C3-targeting RNA guide sequence portion
cuauacaugaacccgaagua

SEQ ID NO: 2255 - RNA, 20 nt, Artificial Sequence
  C3-targeting RNA guide sequence portion
cucaaacucccggacacccu

SEQ ID NO: 2256 - RNA, 20 nt, Artificial Sequence
  C3-targeting RNA guide sequence portion
cucaaaucuuagagcacccc

SEQ ID NO: 2257 - RNA, 20 nt, Artificial Sequence
  C3-targeting RNA guide sequence portion
cucaaccacaugggcaggac

SEQ ID NO: 2258 - RNA, 20 nt, Artificial Sequence
  C3-targeting RNA guide sequence portion
cucaacucuaccuacccaaa

SEQ ID NO: 2259 - RNA, 20 nt, Artificial Sequence
  C3-targeting RNA guide sequence portion
cucaauucuagaaacauccc

SEQ ID NO: 2260 - RNA, 20 nt, Artificial Sequence
  C3-targeting RNA guide sequence portion
cucacaggcagcccaaauau

SEQ ID NO: 2261 - RNA, 20 nt, Artificial Sequence
  C3-targeting RNA guide sequence portion
cucacaggcagcccaaaugu

SEQ ID NO: 2262 - RNA, 20 nt, Artificial Sequence
  C3-targeting RNA guide sequence portion
cucacauccguggaaugaca

SEQ ID NO: 2263 - RNA, 20 nt, Artificial Sequence
  C3-targeting RNA guide sequence portion
cucacuggagucagcgccug

SEQ ID NO: 2264 - RNA, 20 nt, Artificial Sequence
  C3-targeting RNA guide sequence portion
cucagccagcugggccuggc

SEQ ID NO: 2265 - RNA, 20 nt, Artificial Sequence
  C3-targeting RNA guide sequence portion
cucaggcagcccaaauguau

SEQ ID NO: 2266 - RNA, 20 nt, Artificial Sequence
  C3-targeting RNA guide sequence portion
cuccaaauauguaaacacuc

SEQ ID NO: 2267 - RNA, 20 nt, Artificial Sequence
  C3-targeting RNA guide sequence portion
cuccaacaccccaguccuaa

SEQ ID NO: 2268 - RNA, 20 nt, Artificial Sequence
  C3-targeting RNA guide sequence portion
cuccaagucucuggacuucc

SEQ ID NO: 2269 - RNA, 20 nt, Artificial Sequence
  C3-targeting RNA guide sequence portion
cuccaauuccaccauaccug

SEQ ID NO: 2270 - RNA, 20 nt, Artificial Sequence
  C3-targeting RNA guide sequence portion
cuccaauuccacgauaccug

SEQ ID NO: 2271 - RNA, 20 nt, Artificial Sequence
  C3-targeting RNA guide sequence portion
cuccaauuccaugauaccug

SEQ ID NO: 2272 - RNA, 20 nt, Artificial Sequence
  C3-targeting RNA guide sequence portion
cuccaggaccagaggcuggg

SEQ ID NO: 2273 - RNA, 20 nt, Artificial Sequence
  C3-targeting RNA guide sequence portion
cuccagugaggacuggcguc

SEQ ID NO: 2274 - RNA, 20 nt, Artificial Sequence
  C3-targeting RNA guide sequence portion
cucccaaaucuuguaaaguc

SEQ ID NO: 2275 - RNA, 20 nt, Artificial Sequence
  C3-targeting RNA guide sequence portion
cucccacucucagccagcug

SEQ ID NO: 2276 - RNA, 20 nt, Artificial Sequence
  C3-targeting RNA guide sequence portion
cucccggacacccucaacuc

SEQ ID NO: 2277 - RNA, 20 nt, Artificial Sequence
  C3-targeting RNA guide sequence portion
cuccuccaagucucuggacu

SEQ ID NO: 2278 - RNA, 20 nt, Artificial Sequence
  C3-targeting RNA guide sequence portion
cucggagguuuggacuuuac

SEQ ID NO: 2279 - RNA, 20 nt, Artificial Sequence
  C3-targeting RNA guide sequence portion
cucguugcccaggcuuucaa

SEQ ID NO: 2280 - RNA, 20 nt, Artificial Sequence
  C3-targeting RNA guide sequence portion
cucuaaacacuccaaauaug

SEQ ID NO: 2281 - RNA, 20 nt, Artificial Sequence
  C3-targeting RNA guide sequence portion
cucuaaaccucaaaucuuag

SEQ ID NO: 2282 - RNA, 20 nt, Artificial Sequence
  C3-targeting RNA guide sequence portion
cucuaagauuugagguuuag

SEQ ID NO: 2283 - RNA, 20 nt, Artificial Sequence
  C3-targeting RNA guide sequence portion
cucuacccacaaacagggcu

SEQ ID NO: 2284 - RNA, 20 nt, Artificial Sequence
  C3-targeting RNA guide sequence portion
cucuaccuacccaaacccac

SEQ ID NO: 2285 - RNA, 20 nt, Artificial Sequence
  C3-targeting RNA guide sequence portion
cucuaccucucuaaacacuc

SEQ ID NO: 2286 - RNA, 20 nt, Artificial Sequence
  C3-targeting RNA guide sequence portion
cucucagccagcugggccug

SEQ ID NO: 2287 - RNA, 20 nt, Artificial Sequence
  C3-targeting RNA guide sequence portion
cucucaggcagcccaaaugu

SEQ ID NO: 2288 - RNA, 20 nt, Artificial Sequence
  C3-targeting RNA guide sequence portion
cucuccaggaccagaggcug

SEQ ID NO: 2289 - RNA, 20 nt, Artificial Sequence
  C3-targeting RNA guide sequence portion
cucucuaaacacuccaaaua

SEQ ID NO: 2290 - RNA, 20 nt, Artificial Sequence
  C3-targeting RNA guide sequence portion
cucuggacuuccagacccac

SEQ ID NO: 2291 - RNA, 20 nt, Artificial Sequence
  C3-targeting RNA guide sequence portion
cucugggcacugccaccguc

SEQ ID NO: 2292 - RNA, 20 nt, Artificial Sequence
  C3-targeting RNA guide sequence portion
cucugguccuggagaggauc

SEQ ID NO: 2293 - RNA, 20 nt, Artificial Sequence
  C3-targeting RNA guide sequence portion
cugaaaauugcaagucccca

SEQ ID NO: 2294 - RNA, 20 nt, Artificial Sequence
  C3-targeting RNA guide sequence portion
cugaaccuuccaaccagcgu

SEQ ID NO: 2295 - RNA, 20 nt, Artificial Sequence
  C3-targeting RNA guide sequence portion
cugaauccacaaacacccaa

SEQ ID NO: 2296 - RNA, 20 nt, Artificial Sequence
  C3-targeting RNA guide sequence portion
cugaauucuacagggaccug

SEQ ID NO: 2297 - RNA, 20 nt, Artificial Sequence
  C3-targeting RNA guide sequence portion
cugacgcugguuggaagguu

SEQ ID NO: 2298 - RNA, 20 nt, Artificial Sequence
  C3-targeting RNA guide sequence portion
cugacuccagugaggacugg

SEQ ID NO: 2299 - RNA, 20 nt, Artificial Sequence
  C3-targeting RNA guide sequence portion
cugagagugggagucauggu

SEQ ID NO: 2300 - RNA, 20 nt, Artificial Sequence
  C3-targeting RNA guide sequence portion
cugagaguuuggguguuuau

SEQ ID NO: 2301 - RNA, 20 nt, Artificial Sequence
  C3-targeting RNA guide sequence portion
cugcaaacucccaaaucuug

SEQ ID NO: 2302 - RNA, 20 nt, Artificial Sequence
  C3-targeting RNA guide sequence portion
cugccaccgucucaaccaca

SEQ ID NO: 2303 - RNA, 20 nt, Artificial Sequence
  C3-targeting RNA guide sequence portion
cugccaggcgcugacuccag

SEQ ID NO: 2304 - RNA, 20 nt, Artificial Sequence
  C3-targeting RNA guide sequence portion
cugcccaugugguugagacg

SEQ ID NO: 2305 - RNA, 20 nt, Artificial Sequence
  C3-targeting RNA guide sequence portion
cugccggcgcacuugccaau

SEQ ID NO: 2306 - RNA, 20 nt, Artificial Sequence
  C3-targeting RNA guide sequence portion
cugccugagaguuugggugu

SEQ ID NO: 2307 - RNA, 20 nt, Artificial Sequence
  C3-targeting RNA guide sequence portion
cugcuaaccccugaauccac

SEQ ID NO: 2308 - RNA, 20 nt, Artificial Sequence
  C3-targeting RNA guide sequence portion
cugcuguccugcccaugugg

SEQ ID NO: 2309 - RNA, 20 nt, Artificial Sequence
  C3-targeting RNA guide sequence portion
cugcuuccaccccagaacca

SEQ ID NO: 2310 - RNA, 20 nt, Artificial Sequence
  C3-targeting RNA guide sequence portion
cuggaaguccagagacuugg

SEQ ID NO: 2311 - RNA, 20 nt, Artificial Sequence
  C3-targeting RNA guide sequence portion
cuggacccccaaaugucugc

SEQ ID NO: 2312 - RNA, 20 nt, Artificial Sequence
  C3-targeting RNA guide sequence portion
cuggacuuccagacccacaa

SEQ ID NO: 2313 - RNA, 20 nt, Artificial Sequence
  C3-targeting RNA guide sequence portion
cuggagaggauccagugacu

SEQ ID NO: 2314 - RNA, 20 nt, Artificial Sequence
  C3-targeting RNA guide sequence portion
cuggagucagcgccuggcag

SEQ ID NO: 2315 - RNA, 20 nt, Artificial Sequence
  C3-targeting RNA guide sequence portion
cuggauccucuccaggacca

SEQ ID NO: 2316 - RNA, 20 nt, Artificial Sequence
  C3-targeting RNA guide sequence portion
cuggauuccacaaacaccca

SEQ ID NO: 2317 - RNA, 20 nt, Artificial Sequence
  C3-targeting RNA guide sequence portion
cuggcaggcugugugcccca

SEQ ID NO: 2318 - RNA, 20 nt, Artificial Sequence
  C3-targeting RNA guide sequence portion
cuggccuuugaaagccuggg

SEQ ID NO: 2319 - RNA, 20 nt, Artificial Sequence
  C3-targeting RNA guide sequence portion
cuggcgucucacauccgugg

SEQ ID NO: 2320 - RNA, 20 nt, Artificial Sequence
  C3-targeting RNA guide sequence portion
cuggcugagagugggaguca

SEQ ID NO: 2321 - RNA, 20 nt, Artificial Sequence
  C3-targeting RNA guide sequence portion
cugggcaacgagggggccac

SEQ ID NO: 2322 - RNA, 20 nt, Artificial Sequence
  C3-targeting RNA guide sequence portion
cugggcacugccaccgucuc

SEQ ID NO: 2323 - RNA, 20 nt, Artificial Sequence
  C3-targeting RNA guide sequence portion
cugggccuggccuuugaaag

SEQ ID NO: 2324 - RNA, 20 nt, Artificial Sequence
  C3-targeting RNA guide sequence portion
cuggggcacacagccugcca

SEQ ID NO: 2325 - RNA, 20 nt, Artificial Sequence
  C3-targeting RNA guide sequence portion
cugggguggaagcagacauu

SEQ ID NO: 2326 - RNA, 20 nt, Artificial Sequence
  C3-targeting RNA guide sequence portion
cugggguguuggagguuuag

SEQ ID NO: 2327 - RNA, 20 nt, Artificial Sequence
  C3-targeting RNA guide sequence portion
cuggguuuggggugcucuaa

SEQ ID NO: 2328 - RNA, 20 nt, Artificial Sequence
  C3-targeting RNA guide sequence portion
cugguccuggagaggaucca

SEQ ID NO: 2329 - RNA, 20 nt, Artificial Sequence
  C3-targeting RNA guide sequence portion
cugguucugggguggaagca

SEQ ID NO: 2330 - RNA, 20 nt, Artificial Sequence
  C3-targeting RNA guide sequence portion
cugguuggaagguucagggu

SEQ ID NO: 2331 - RNA, 20 nt, Artificial Sequence
  C3-targeting RNA guide sequence portion
cuguagaauucagggugcau

SEQ ID NO: 2332 - RNA, 20 nt, Artificial Sequence
  C3-targeting RNA guide sequence portion
cuguccugcccaugugguug

SEQ ID NO: 2333 - RNA, 20 nt, Artificial Sequence
  C3-targeting RNA guide sequence portion
cugucggaguggggcacggg

SEQ ID NO: 2334 - RNA, 20 nt, Artificial Sequence
  C3-targeting RNA guide sequence portion
cugugugccccagccucugg

SEQ ID NO: 2335 - RNA, 20 nt, Artificial Sequence
  C3-targeting RNA guide sequence portion
cuguugguuuaggguguaug

SEQ ID NO: 2336 - RNA, 20 nt, Artificial Sequence
  C3-targeting RNA guide sequence portion
cuguuuguggguagagucau

SEQ ID NO: 2337 - RNA, 20 nt, Artificial Sequence
  C3-targeting RNA guide sequence portion
cuuagagcaccccaaaccca

SEQ ID NO: 2338 - RNA, 20 nt, Artificial Sequence
  C3-targeting RNA guide sequence portion
cuuccaaccagcgucagcaa

SEQ ID NO: 2339 - RNA, 20 nt, Artificial Sequence
  C3-targeting RNA guide sequence portion
cuuccaccccagaaccagcc

SEQ ID NO: 2340 - RNA, 20 nt, Artificial Sequence
  C3-targeting RNA guide sequence portion
cuuccagacccacaaucgcc

SEQ ID NO: 2341 - RNA, 20 nt, Artificial Sequence
  C3-targeting RNA guide sequence portion
cuucggguucauguauaguu

SEQ ID NO: 2342 - RNA, 20 nt, Artificial Sequence
  C3-targeting RNA guide sequence portion
cuucucugggcacugccacc

SEQ ID NO: 2343 - RNA, 20 nt, Artificial Sequence
  C3-targeting RNA guide sequence portion
cuugcaauuuucaguguggg

SEQ ID NO: 2344 - RNA, 20 nt, Artificial Sequence
  C3-targeting RNA guide sequence portion
cuugccaaugccauuaucuu

SEQ ID NO: 2345 - RNA, 20 nt, Artificial Sequence
  C3-targeting RNA guide sequence portion
cuuggaggaguugcugacgc

SEQ ID NO: 2346 - RNA, 20 nt, Artificial Sequence
  C3-targeting RNA guide sequence portion
cuuggggacuugcaauuuuc

SEQ ID NO: 2347 - RNA, 20 nt, Artificial Sequence
  C3-targeting RNA guide sequence portion
cuuguaaaguccaaaccucc

SEQ ID NO: 2348 - RNA, 20 nt, Artificial Sequence
  C3-targeting RNA guide sequence portion
cuugucauuccacggaugug

SEQ ID NO: 2349 - RNA, 20 nt, Artificial Sequence
  C3-targeting RNA guide sequence portion
cuuuaaacccacacugaaaa

SEQ ID NO: 2350 - RNA, 20 nt, Artificial Sequence
  C3-targeting RNA guide sequence portion
cuuuacaagauuugggaguu

SEQ ID NO: 2351 - RNA, 20 nt, Artificial Sequence
  C3-targeting RNA guide sequence portion
cuuucaaaggccaggcccag

SEQ ID NO: 2352 - RNA, 20 nt, Artificial Sequence
  C3-targeting RNA guide sequence portion
cuuugaaagccugggcaacg

SEQ ID NO: 2353 - RNA, 20 nt, Artificial Sequence
  C3-targeting RNA guide sequence portion
gaaaauugcaaguccccaag

SEQ ID NO: 2354 - RNA, 20 nt, Artificial Sequence
  C3-targeting RNA guide sequence portion
gaaacaucccaaacuccaau

SEQ ID NO: 2355 - RNA, 20 nt, Artificial Sequence
  C3-targeting RNA guide sequence portion
gaaagccugggcaacgaggg

SEQ ID NO: 2356 - RNA, 20 nt, Artificial Sequence
  C3-targeting RNA guide sequence portion
gaacaccacauacacccuaa

SEQ ID NO: 2357 - RNA, 20 nt, Artificial Sequence
  C3-targeting RNA guide sequence portion
gaaccagcccuguuuguggg

SEQ ID NO: 2358 - RNA, 20 nt, Artificial Sequence
  C3-targeting RNA guide sequence portion
gaacccgaaguagccaaucu

SEQ ID NO: 2359 - RNA, 20 nt, Artificial Sequence
  C3-targeting RNA guide sequence portion
gaaccuuccaaccagcguca

SEQ ID NO: 2360 - RNA, 20 nt, Artificial Sequence
  C3-targeting RNA guide sequence portion
gaagauaauggcauuggcaa

SEQ ID NO: 2361 - RNA, 20 nt, Artificial Sequence
  C3-targeting RNA guide sequence portion
gaagcagacauuuggggguc

SEQ ID NO: 2362 - RNA, 20 nt, Artificial Sequence
  C3-targeting RNA guide sequence portion
gaagguucaggguuuggugg

SEQ ID NO: 2363 - RNA, 20 nt, Artificial Sequence
  C3-targeting RNA guide sequence portion
gaaguagccaaucuuuaaac

SEQ ID NO: 2364 - RNA, 20 nt, Artificial Sequence
  C3-targeting RNA guide sequence portion
gaaguccagagacuuggagg

SEQ ID NO: 2365 - RNA, 20 nt, Artificial Sequence
  C3-targeting RNA guide sequence portion
gaauccacaaacacccaaau

SEQ ID NO: 2366 - RNA, 20 nt, Artificial Sequence
  C3-targeting RNA guide sequence portion
gaauccagguaucauggaau

SEQ ID NO: 2367 - RNA, 20 nt, Artificial Sequence
  C3-targeting RNA guide sequence portion
gaauccagguaucguggaau

SEQ ID NO: 2368 - RNA, 20 nt, Artificial Sequence
  C3-targeting RNA guide sequence portion
gaauccagguaugguggaau

SEQ ID NO: 2369 - RNA, 20 nt, Artificial Sequence
  C3-targeting RNA guide sequence portion
gaaugacaagcccacucccg

SEQ ID NO: 2370 - RNA, 20 nt, Artificial Sequence
  C3-targeting RNA guide sequence portion
gaaugauuauauauauuugg

SEQ ID NO: 2371 - RNA, 20 nt, Artificial Sequence
  C3-targeting RNA guide sequence portion
gaauucagggugcauuuggg

SEQ ID NO: 2372 - RNA, 20 nt, Artificial Sequence
  C3-targeting RNA guide sequence portion
gaauucuacagggaccugga

SEQ ID NO: 2373 - RNA, 20 nt, Artificial Sequence
  C3-targeting RNA guide sequence portion
gaauugaggucaucuguugg

SEQ ID NO: 2374 - RNA, 20 nt, Artificial Sequence
  C3-targeting RNA guide sequence portion
gaauugauuguauuuauuag

SEQ ID NO: 2375 - RNA, 20 nt, Artificial Sequence
  C3-targeting RNA guide sequence portion
gaauuggaguuugggauguu

SEQ ID NO: 2376 - RNA, 20 nt, Artificial Sequence
  C3-targeting RNA guide sequence portion
gacaagcccacucccgugcc

SEQ ID NO: 2377 - RNA, 20 nt, Artificial Sequence
  C3-targeting RNA guide sequence portion
gacacccucaacucuaccua

SEQ ID NO: 2378 - RNA, 20 nt, Artificial Sequence
  C3-targeting RNA guide sequence portion
gacagcagccaccaugacuc

SEQ ID NO: 2379 - RNA, 20 nt, Artificial Sequence
  C3-targeting RNA guide sequence portion
gacauuuggggguccagguc

SEQ ID NO: 2380 - RNA, 20 nt, Artificial Sequence
  C3-targeting RNA guide sequence portion
gaccagaggcuggggcacac

SEQ ID NO: 2381 - RNA, 20 nt, Artificial Sequence
  C3-targeting RNA guide sequence portion
gacccacaaucgccuaaacc

SEQ ID NO: 2382 - RNA, 20 nt, Artificial Sequence
  C3-targeting RNA guide sequence portion
gacccccaaaugucugcuuc

SEQ ID NO: 2383 - RNA, 20 nt, Artificial Sequence
  C3-targeting RNA guide sequence portion
gaccucaauucuagaaacau

SEQ ID NO: 2384 - RNA, 20 nt, Artificial Sequence
  C3-targeting RNA guide sequence portion
gaccuggacccccaaauguc

SEQ ID NO: 2385 - RNA, 20 nt, Artificial Sequence
  C3-targeting RNA guide sequence portion
gacgccaguccucacuggag

SEQ ID NO: 2386 - RNA, 20 nt, Artificial Sequence
  C3-targeting RNA guide sequence portion
gacgcugguuggaagguuca

SEQ ID NO: 2387 - RNA, 20 nt, Artificial Sequence
  C3-targeting RNA guide sequence portion
gacgguggcagugcccagag

SEQ ID NO: 2388 - RNA, 20 nt, Artificial Sequence
  C3-targeting RNA guide sequence portion
gacuccagugaggacuggcg

SEQ ID NO: 2389 - RNA, 20 nt, Artificial Sequence
  C3-targeting RNA guide sequence portion
gacucccacucucagccagc

SEQ ID NO: 2390 - RNA, 20 nt, Artificial Sequence
  C3-targeting RNA guide sequence portion
gacucggagguuuggacuuu

SEQ ID NO: 2391 - RNA, 20 nt, Artificial Sequence
  C3-targeting RNA guide sequence portion
gacucuacccacaaacaggg

SEQ ID NO: 2392 - RNA, 20 nt, Artificial Sequence
  C3-targeting RNA guide sequence portion
gacugccggcgcacuugcca

SEQ ID NO: 2393 - RNA, 20 nt, Artificial Sequence
  C3-targeting RNA guide sequence portion
gacuggcgucucacauccgu

SEQ ID NO: 2394 - RNA, 20 nt, Artificial Sequence
  C3-targeting RNA guide sequence portion
gacugggguguuggagguuu

SEQ ID NO: 2395 - RNA, 20 nt, Artificial Sequence
  C3-targeting RNA guide sequence portion
gacuuccagacccacaaucg

SEQ ID NO: 2396 - RNA, 20 nt, Artificial Sequence
  C3-targeting RNA guide sequence portion
gacuugcaauuuucagugug

SEQ ID NO: 2397 - RNA, 20 nt, Artificial Sequence
  C3-targeting RNA guide sequence portion
gacuuggaggaguugcugac

SEQ ID NO: 2398 - RNA, 20 nt, Artificial Sequence
  C3-targeting RNA guide sequence portion
gacuuuacaagauuugggag

SEQ ID NO: 2399 - RNA, 20 nt, Artificial Sequence
  C3-targeting RNA guide sequence portion
gagaagauaauggcauuggc

SEQ ID NO: 2400 - RNA, 20 nt, Artificial Sequence
  C3-targeting RNA guide sequence portion
gagacgccaguccucacugg

SEQ ID NO: 2401 - RNA, 20 nt, Artificial Sequence
  C3-targeting RNA guide sequence portion
gagacgguggcagugcccag

SEQ ID NO: 2402 - RNA, 20 nt, Artificial Sequence
  C3-targeting RNA guide sequence portion
gagacucggagguuuggacu

SEQ ID NO: 2403 - RNA, 20 nt, Artificial Sequence
  C3-targeting RNA guide sequence portion
gagacuuggaggaguugcug

SEQ ID NO: 2404 - RNA, 20 nt, Artificial Sequence
  C3-targeting RNA guide sequence portion
gagaggauccagugacugcc

SEQ ID NO: 2405 - RNA, 20 nt, Artificial Sequence
  C3-targeting RNA guide sequence portion
gagagguagagguuuagggu

SEQ ID NO: 2406 - RNA, 20 nt, Artificial Sequence
  C3-targeting RNA guide sequence portion
gagagugggagucauggugg

SEQ ID NO: 2407 - RNA, 20 nt, Artificial Sequence
  C3-targeting RNA guide sequence portion
gagaguuuggguguuuaugg

SEQ ID NO: 2408 - RNA, 20 nt, Artificial Sequence
  C3-targeting RNA guide sequence portion
gagcaccccaaacccagccu

SEQ ID NO: 2409 - RNA, 20 nt, Artificial Sequence
  C3-targeting RNA guide sequence portion
gaggacuggcgucucacauc

SEQ ID NO: 2410 - RNA, 20 nt, Artificial Sequence
  C3-targeting RNA guide sequence portion
gaggaguugcugacgcuggu

SEQ ID NO: 2411 - RNA, 20 nt, Artificial Sequence
  C3-targeting RNA guide sequence portion
gaggauccagugacugccgg

SEQ ID NO: 2412 - RNA, 20 nt, Artificial Sequence
  C3-targeting RNA guide sequence portion
gaggcuggggcacacagccu

SEQ ID NO: 2413 - RNA, 20 nt, Artificial Sequence
  C3-targeting RNA guide sequence portion
gagggggccacacaucccac

SEQ ID NO: 2414 - RNA, 20 nt, Artificial Sequence
  C3-targeting RNA guide sequence portion
gaggguguccgggaguuuga

SEQ ID NO: 2415 - RNA, 20 nt, Artificial Sequence
  C3-targeting RNA guide sequence portion
gagguagagguuuaggguuu

SEQ ID NO: 2416 - RNA, 20 nt, Artificial Sequence
  C3-targeting RNA guide sequence portion
gaggucaucuguugguuuag

SEQ ID NO: 2417 - RNA, 20 nt, Artificial Sequence
  C3-targeting RNA guide sequence portion
gagguuuagagguuuuggcg

SEQ ID NO: 2418 - RNA, 20 nt, Artificial Sequence
  C3-targeting RNA guide sequence portion
gagguuuaggcuggguuugg

SEQ ID NO: 2419 - RNA, 20 nt, Artificial Sequence
  C3-targeting RNA guide sequence portion
gagguuuaggguuuggggca

SEQ ID NO: 2420 - RNA, 20 nt, Artificial Sequence
  C3-targeting RNA guide sequence portion
gagguuuggacuuuacaaga

SEQ ID NO: 2421 - RNA, 20 nt, Artificial Sequence
  C3-targeting RNA guide sequence portion
gagguuuuggcguauguggg

SEQ ID NO: 2422 - RNA, 20 nt, Artificial Sequence
  C3-targeting RNA guide sequence portion
gagucagcgccuggcaggcu

SEQ ID NO: 2423 - RNA, 20 nt, Artificial Sequence
  C3-targeting RNA guide sequence portion
gagucaugguggcugcuguc

SEQ ID NO: 2424 - RNA, 20 nt, Artificial Sequence
  C3-targeting RNA guide sequence portion
gagugggagucaugguggcu

SEQ ID NO: 2425 - RNA, 20 nt, Artificial Sequence
  C3-targeting RNA guide sequence portion
gagugggcuugucauuccac

SEQ ID NO: 2426 - RNA, 20 nt, Artificial Sequence
  C3-targeting RNA guide sequence portion
gaguggggcacgggaguggg

SEQ ID NO: 2427 - RNA, 20 nt, Artificial Sequence
  C3-targeting RNA guide sequence portion
gagugguuaugacucuaccc

SEQ ID NO: 2428 - RNA, 20 nt, Artificial Sequence
  C3-targeting RNA guide sequence portion
gaguguuuacauauuuggag

SEQ ID NO: 2429 - RNA, 20 nt, Artificial Sequence
  C3-targeting RNA guide sequence portion
gaguguuuagagagguagag

SEQ ID NO: 2430 - RNA, 20 nt, Artificial Sequence
  C3-targeting RNA guide sequence portion
gaguugaggguguccgggag

SEQ ID NO: 2431 - RNA, 20 nt, Artificial Sequence
  C3-targeting RNA guide sequence portion
gaguugcugacgcugguugg

SEQ ID NO: 2432 - RNA, 20 nt, Artificial Sequence
  C3-targeting RNA guide sequence portion
gaguuugaguguuuacauau

SEQ ID NO: 2433 - RNA, 20 nt, Artificial Sequence
  C3-targeting RNA guide sequence portion
gaguuugcagcuuggggacu

SEQ ID NO: 2434 - RNA, 20 nt, Artificial Sequence
  C3-targeting RNA guide sequence portion
gaguuugggauguuucuaga

SEQ ID NO: 2435 - RNA, 20 nt, Artificial Sequence
  C3-targeting RNA guide sequence portion
gauaauggcauuggcaagug

SEQ ID NO: 2436 - RNA, 20 nt, Artificial Sequence
  C3-targeting RNA guide sequence portion
gauccagugacugccggcgc

SEQ ID NO: 2437 - RNA, 20 nt, Artificial Sequence
  C3-targeting RNA guide sequence portion
gauccucuccaggaccagag

SEQ ID NO: 2438 - RNA, 20 nt, Artificial Sequence
  C3-targeting RNA guide sequence portion
gaugaccucaauucuagaaa

SEQ ID NO: 2439 - RNA, 20 nt, Artificial Sequence
  C3-targeting RNA guide sequence portion
gaugugagacgccaguccuc

SEQ ID NO: 2440 - RNA, 20 nt, Artificial Sequence
  C3-targeting RNA guide sequence portion
gauguguggcccccucguug

SEQ ID NO: 2441 - RNA, 20 nt, Artificial Sequence
  C3-targeting RNA guide sequence portion
gauguuucuagaauugaggu

SEQ ID NO: 2442 - RNA, 20 nt, Artificial Sequence
  C3-targeting RNA guide sequence portion
gauuauauauauuugggcug

SEQ ID NO: 2443 - RNA, 20 nt, Artificial Sequence
  C3-targeting RNA guide sequence portion
gauucagggguuagcagguu

SEQ ID NO: 2444 - RNA, 20 nt, Artificial Sequence
  C3-targeting RNA guide sequence portion
gauuccacaaacacccaacc

SEQ ID NO: 2445 - RNA, 20 nt, Artificial Sequence
  C3-targeting RNA guide sequence portion
gauuggcuacuucggguuca

SEQ ID NO: 2446 - RNA, 20 nt, Artificial Sequence
  C3-targeting RNA guide sequence portion
gauuguauuuauuaggacug

SEQ ID NO: 2447 - RNA, 20 nt, Artificial Sequence
  C3-targeting RNA guide sequence portion
gauugugggucuggaagucc

SEQ ID NO: 2448 - RNA, 20 nt, Artificial Sequence
  C3-targeting RNA guide sequence portion
gauuugagguuuagagguuu

SEQ ID NO: 2449 - RNA, 20 nt, Artificial Sequence
  C3-targeting RNA guide sequence portion
gauuugggaguuugcagcuu

SEQ ID NO: 2450 - RNA, 20 nt, Artificial Sequence
  C3-targeting RNA guide sequence portion
gcaaacucccaaaucuugua

SEQ ID NO: 2451 - RNA, 20 nt, Artificial Sequence
  C3-targeting RNA guide sequence portion
gcaacgagggggccacacau

SEQ ID NO: 2452 - RNA, 20 nt, Artificial Sequence
  C3-targeting RNA guide sequence portion
gcaacuccuccaagucucug

SEQ ID NO: 2453 - RNA, 20 nt, Artificial Sequence
  C3-targeting RNA guide sequence portion
gcaaguccccaagcugcaaa

SEQ ID NO: 2454 - RNA, 20 nt, Artificial Sequence
  C3-targeting RNA guide sequence portion
gcaagugcgccggcagucac

SEQ ID NO: 2455 - RNA, 20 nt, Artificial Sequence
  C3-targeting RNA guide sequence portion
gcaauuuucaguguggguuu

SEQ ID NO: 2456 - RNA, 20 nt, Artificial Sequence
  C3-targeting RNA guide sequence portion
gcacacagccugccaggcgc

SEQ ID NO: 2457 - RNA, 20 nt, Artificial Sequence
  C3-targeting RNA guide sequence portion
gcaccaucaaugaacaccac

SEQ ID NO: 2458 - RNA, 20 nt, Artificial Sequence
  C3-targeting RNA guide sequence portion
gcaccccaaacccagccuaa

SEQ ID NO: 2459 - RNA, 20 nt, Artificial Sequence
  C3-targeting RNA guide sequence portion
gcacccugaauucuacaggg

SEQ ID NO: 2460 - RNA, 20 nt, Artificial Sequence
  C3-targeting RNA guide sequence portion
gcacgggagugggcuuguca

SEQ ID NO: 2461 - RNA, 20 nt, Artificial Sequence
  C3-targeting RNA guide sequence portion
gcacugccaccgucucaacc

SEQ ID NO: 2462 - RNA, 20 nt, Artificial Sequence
  C3-targeting RNA guide sequence portion
gcacuugccaaugccauuau

SEQ ID NO: 2463 - RNA, 20 nt, Artificial Sequence
  C3-targeting RNA guide sequence portion
gcagacauuuggggguccag

SEQ ID NO: 2464 - RNA, 20 nt, Artificial Sequence
  C3-targeting RNA guide sequence portion
gcagccaccaugacucccac

SEQ ID NO: 2465 - RNA, 20 nt, Artificial Sequence
  C3-targeting RNA guide sequence portion
gcagcccaaauauauauaau

SEQ ID NO: 2466 - RNA, 20 nt, Artificial Sequence
  C3-targeting RNA guide sequence portion
gcagcuuggggacuugcaau

SEQ ID NO: 2467 - RNA, 20 nt, Artificial Sequence
  C3-targeting RNA guide sequence portion
gcaggacagcagccaccaug

SEQ ID NO: 2468 - RNA, 20 nt, Artificial Sequence
  C3-targeting RNA guide sequence portion
gcaggcugugugccccagcc

SEQ ID NO: 2469 - RNA, 20 nt, Artificial Sequence
  C3-targeting RNA guide sequence portion
gcagguugggaaugauuaua

SEQ ID NO: 2470 - RNA, 20 nt, Artificial Sequence
  C3-targeting RNA guide sequence portion
gcagucacuggauccucucc

SEQ ID NO: 2471 - RNA, 20 nt, Artificial Sequence
  C3-targeting RNA guide sequence portion
gcagugcccagagaagauaa

SEQ ID NO: 2472 - RNA, 20 nt, Artificial Sequence
  C3-targeting RNA guide sequence portion
gcauguguggguuuaggcga

SEQ ID NO: 2473 - RNA, 20 nt, Artificial Sequence
  C3-targeting RNA guide sequence portion
gcauuggcaagugcgccggc

SEQ ID NO: 2474 - RNA, 20 nt, Artificial Sequence
  C3-targeting RNA guide sequence portion
gcauuuggguguuuguggau

SEQ ID NO: 2475 - RNA, 20 nt, Artificial Sequence
  C3-targeting RNA guide sequence portion
gccaaaaccucuaaaccuca

SEQ ID NO: 2476 - RNA, 20 nt, Artificial Sequence
  C3-targeting RNA guide sequence portion
gccaaucuuuaaacccacac

SEQ ID NO: 2477 - RNA, 20 nt, Artificial Sequence
  C3-targeting RNA guide sequence portion
gccaaugccauuaucuucuc

SEQ ID NO: 2478 - RNA, 20 nt, Artificial Sequence
  C3-targeting RNA guide sequence portion
gccacacaucccaccaaacc

SEQ ID NO: 2479 - RNA, 20 nt, Artificial Sequence
  C3-targeting RNA guide sequence portion
gccaccaugacucccacucu

SEQ ID NO: 2480 - RNA, 20 nt, Artificial Sequence
  C3-targeting RNA guide sequence portion
gccaccgucucaaccacaug

SEQ ID NO: 2481 - RNA, 20 nt, Artificial Sequence
  C3-targeting RNA guide sequence portion
gccagcugggccuggccuuu

SEQ ID NO: 2482 - RNA, 20 nt, Artificial Sequence
  C3-targeting RNA guide sequence portion
gccaggcccagcuggcugag

SEQ ID NO: 2483 - RNA, 20 nt, Artificial Sequence
  C3-targeting RNA guide sequence portion
gccaggcgcugacuccagug

SEQ ID NO: 2484 - RNA, 20 nt, Artificial Sequence
  C3-targeting RNA guide sequence portion
gccaguccucacuggaguca

SEQ ID NO: 2485 - RNA, 20 nt, Artificial Sequence
  C3-targeting RNA guide sequence portion
gccauuaucuucucugggca

SEQ ID NO: 2486 - RNA, 20 nt, Artificial Sequence
  C3-targeting RNA guide sequence portion
gcccaaauauauauaaucau

SEQ ID NO: 2487 - RNA, 20 nt, Artificial Sequence
  C3-targeting RNA guide sequence portion
gcccacucccgugccccacu

SEQ ID NO: 2488 - RNA, 20 nt, Artificial Sequence
  C3-targeting RNA guide sequence portion
gcccagagaagauaauggca

SEQ ID NO: 2489 - RNA, 20 nt, Artificial Sequence
  C3-targeting RNA guide sequence portion
gcccagcuggcugagagugg

SEQ ID NO: 2490 - RNA, 20 nt, Artificial Sequence
  C3-targeting RNA guide sequence portion
gcccaggcuuucaaaggcca

SEQ ID NO: 2491 - RNA, 20 nt, Artificial Sequence
  C3-targeting RNA guide sequence portion
gcccaugugguugagacggu

SEQ ID NO: 2492 - RNA, 20 nt, Artificial Sequence
  C3-targeting RNA guide sequence portion
gccccaaacccuaaaccucu

SEQ ID NO: 2493 - RNA, 20 nt, Artificial Sequence
  C3-targeting RNA guide sequence portion
gccccaacuauacaugaacc

SEQ ID NO: 2494 - RNA, 20 nt, Artificial Sequence
  C3-targeting RNA guide sequence portion
gccccagccucugguccugg

SEQ ID NO: 2495 - RNA, 20 nt, Artificial Sequence
  C3-targeting RNA guide sequence portion
gcccccucguugcccaggcu

SEQ ID NO: 2496 - RNA, 20 nt, Artificial Sequence
  C3-targeting RNA guide sequence portion
gcccuguuuguggguagagu

SEQ ID NO: 2497 - RNA, 20 nt, Artificial Sequence
  C3-targeting RNA guide sequence portion
gccggcagucacuggauccu

SEQ ID NO: 2498 - RNA, 20 nt, Artificial Sequence
  C3-targeting RNA guide sequence portion
gccggcgcacuugccaaugc

SEQ ID NO: 2499 - RNA, 20 nt, Artificial Sequence
  C3-targeting RNA guide sequence portion
gccuaaacccacacaugccc

SEQ ID NO: 2500 - RNA, 20 nt, Artificial Sequence
  C3-targeting RNA guide sequence portion
gccuaaaccuccaacacccc

SEQ ID NO: 2501 - RNA, 20 nt, Artificial Sequence
  C3-targeting RNA guide sequence portion
gccucugguccuggagagga

SEQ ID NO: 2502 - RNA, 20 nt, Artificial Sequence
  C3-targeting RNA guide sequence portion
gccugagaguuuggguguuu

SEQ ID NO: 2503 - RNA, 20 nt, Artificial Sequence
  C3-targeting RNA guide sequence portion
gccugccaggcgcugacucc

SEQ ID NO: 2504 - RNA, 20 nt, Artificial Sequence
  C3-targeting RNA guide sequence portion
gccuggcaggcugugugccc

SEQ ID NO: 2505 - RNA, 20 nt, Artificial Sequence
  C3-targeting RNA guide sequence portion
gccuggccuuugaaagccug

SEQ ID NO: 2506 - RNA, 20 nt, Artificial Sequence
  C3-targeting RNA guide sequence portion
gccugggcaacgagggggcc

SEQ ID NO: 2507 - RNA, 20 nt, Artificial Sequence
  C3-targeting RNA guide sequence portion
gccuuugaaagccugggcaa

SEQ ID NO: 2508 - RNA, 20 nt, Artificial Sequence
  C3-targeting RNA guide sequence portion
gcgauugugggucuggaagu

SEQ ID NO: 2509 - RNA, 20 nt, Artificial Sequence
  C3-targeting RNA guide sequence portion
gcgcacuugccaaugccauu

SEQ ID NO: 2510 - RNA, 20 nt, Artificial Sequence
  C3-targeting RNA guide sequence portion
gcgccggcagucacuggauc

SEQ ID NO: 2511 - RNA, 20 nt, Artificial Sequence
  C3-targeting RNA guide sequence portion
gcgccuggcaggcugugugc

SEQ ID NO: 2512 - RNA, 20 nt, Artificial Sequence
  C3-targeting RNA guide sequence portion
gcgcugacuccagugaggac

SEQ ID NO: 2513 - RNA, 20 nt, Artificial Sequence
  C3-targeting RNA guide sequence portion
gcguauguggguuuggguag

SEQ ID NO: 2514 - RNA, 20 nt, Artificial Sequence
  C3-targeting RNA guide sequence portion
gcgucagcaacuccuccaag

SEQ ID NO: 2515 - RNA, 20 nt, Artificial Sequence
  C3-targeting RNA guide sequence portion
gcgucucacauccguggaau

SEQ ID NO: 2516 - RNA, 20 nt, Artificial Sequence
  C3-targeting RNA guide sequence portion
gcuaaccccugaauccacaa

SEQ ID NO: 2517 - RNA, 20 nt, Artificial Sequence
  C3-targeting RNA guide sequence portion
gcuacuucggguucauguau

SEQ ID NO: 2518 - RNA, 20 nt, Artificial Sequence
  C3-targeting RNA guide sequence portion
gcucuaagauuugagguuua

SEQ ID NO: 2519 - RNA, 20 nt, Artificial Sequence
  C3-targeting RNA guide sequence portion
gcugacgcugguuggaaggu

SEQ ID NO: 2520 - RNA, 20 nt, Artificial Sequence
  C3-targeting RNA guide sequence portion
gcugacuccagugaggacug

SEQ ID NO: 2521 - RNA, 20 nt, Artificial Sequence
  C3-targeting RNA guide sequence portion
gcugagagugggagucaugg

SEQ ID NO: 2522 - RNA, 20 nt, Artificial Sequence
  C3-targeting RNA guide sequence portion
gcugcaaacucccaaaucuu

SEQ ID NO: 2523 - RNA, 20 nt, Artificial Sequence
  C3-targeting RNA guide sequence portion
gcugccugagaguuugggug

SEQ ID NO: 2524 - RNA, 20 nt, Artificial Sequence
  C3-targeting RNA guide sequence portion
gcugcuguccugcccaugug

SEQ ID NO: 2525 - RNA, 20 nt, Artificial Sequence
  C3-targeting RNA guide sequence portion
gcuggcugagagugggaguc

SEQ ID NO: 2526 - RNA, 20 nt, Artificial Sequence
  C3-targeting RNA guide sequence portion
gcugggccuggccuuugaaa

SEQ ID NO: 2527 - RNA, 20 nt, Artificial Sequence
  C3-targeting RNA guide sequence portion
gcuggggcacacagccugcc

SEQ ID NO: 2528 - RNA, 20 nt, Artificial Sequence
  C3-targeting RNA guide sequence portion
gcuggguuuggggugcucua

SEQ ID NO: 2529 - RNA, 20 nt, Artificial Sequence
  C3-targeting RNA guide sequence portion
gcugguucugggguggaagc

SEQ ID NO: 2530 - RNA, 20 nt, Artificial Sequence
  C3-targeting RNA guide sequence portion
gcugguuggaagguucaggg

SEQ ID NO: 2531 - RNA, 20 nt, Artificial Sequence
  C3-targeting RNA guide sequence portion
gcuguccugcccaugugguu

SEQ ID NO: 2532 - RNA, 20 nt, Artificial Sequence
  C3-targeting RNA guide sequence portion
gcugugugccccagccucug

SEQ ID NO: 2533 - RNA, 20 nt, Artificial Sequence
  C3-targeting RNA guide sequence portion
gcuuccaccccagaaccagc

SEQ ID NO: 2534 - RNA, 20 nt, Artificial Sequence
  C3-targeting RNA guide sequence portion
gcuuggggacuugcaauuuu

SEQ ID NO: 2535 - RNA, 20 nt, Artificial Sequence
  C3-targeting RNA guide sequence portion
gcuugucauuccacggaugu

SEQ ID NO: 2536 - RNA, 20 nt, Artificial Sequence
  C3-targeting RNA guide sequence portion
gcuuucaaaggccaggccca

SEQ ID NO: 2537 - RNA, 20 nt, Artificial Sequence
  C3-targeting RNA guide sequence portion
ggaagcagacauuugggggu

SEQ ID NO: 2538 - RNA, 20 nt, Artificial Sequence
  C3-targeting RNA guide sequence portion
ggaagguucaggguuuggug

SEQ ID NO: 2539 - RNA, 20 nt, Artificial Sequence
  C3-targeting RNA guide sequence portion
ggaaguccagagacuuggag

SEQ ID NO: 2540 - RNA, 20 nt, Artificial Sequence
  C3-targeting RNA guide sequence portion
ggaauccagguaucauggaa

SEQ ID NO: 2541 - RNA, 20 nt, Artificial Sequence
  C3-targeting RNA guide sequence portion
ggaauccagguaucguggaa

SEQ ID NO: 2542 - RNA, 20 nt, Artificial Sequence
  C3-targeting RNA guide sequence portion
ggaauccagguaugguggaa

SEQ ID NO: 2543 - RNA, 20 nt, Artificial Sequence
  C3-targeting RNA guide sequence portion
ggaaugacaagcccacuccc

SEQ ID NO: 2544 - RNA, 20 nt, Artificial Sequence
  C3-targeting RNA guide sequence portion
ggaaugauuauauauauuug

SEQ ID NO: 2545 - RNA, 20 nt, Artificial Sequence
  C3-targeting RNA guide sequence portion
ggaauugauuguauuuauua

SEQ ID NO: 2546 - RNA, 20 nt, Artificial Sequence
  C3-targeting RNA guide sequence portion
ggaauuggaguuugggaugu

SEQ ID NO: 2547 - RNA, 20 nt, Artificial Sequence
  C3-targeting RNA guide sequence portion
ggacacccucaacucuaccu

SEQ ID NO: 2548 - RNA, 20 nt, Artificial Sequence
  C3-targeting RNA guide sequence portion
ggacagcagccaccaugacu

SEQ ID NO: 2549 - RNA, 20 nt, Artificial Sequence
  C3-targeting RNA guide sequence portion
ggaccagaggcuggggcaca

SEQ ID NO: 2550 - RNA, 20 nt, Artificial Sequence
  C3-targeting RNA guide sequence portion
ggacccccaaaugucugcuu

SEQ ID NO: 2551 - RNA, 20 nt, Artificial Sequence
  C3-targeting RNA guide sequence portion
ggaccuggacccccaaaugu

SEQ ID NO: 2552 - RNA, 20 nt, Artificial Sequence
  C3-targeting RNA guide sequence portion
ggacuggcgucucacauccg

SEQ ID NO: 2553 - RNA, 20 nt, Artificial Sequence
  C3-targeting RNA guide sequence portion
ggacugggguguuggagguu

SEQ ID NO: 2554 - RNA, 20 nt, Artificial Sequence
  C3-targeting RNA guide sequence portion
ggacuuccagacccacaauc

SEQ ID NO: 2555 - RNA, 20 nt, Artificial Sequence
  C3-targeting RNA guide sequence portion
ggacuugcaauuuucagugu

SEQ ID NO: 2556 - RNA, 20 nt, Artificial Sequence
  C3-targeting RNA guide sequence portion
ggacuuuacaagauuuggga

SEQ ID NO: 2557 - RNA, 20 nt, Artificial Sequence
  C3-targeting RNA guide sequence portion
ggagacucggagguuuggac

SEQ ID NO: 2558 - RNA, 20 nt, Artificial Sequence
  C3-targeting RNA guide sequence portion
ggagaggauccagugacugc

SEQ ID NO: 2559 - RNA, 20 nt, Artificial Sequence
  C3-targeting RNA guide sequence portion
ggaggaguugcugacgcugg

SEQ ID NO: 2560 - RNA, 20 nt, Artificial Sequence
  C3-targeting RNA guide sequence portion
ggagguuuaggcuggguuug

SEQ ID NO: 2561 - RNA, 20 nt, Artificial Sequence
  C3-targeting RNA guide sequence portion
ggagguuuggacuuuacaag

SEQ ID NO: 2562 - RNA, 20 nt, Artificial Sequence
  C3-targeting RNA guide sequence portion
ggagucagcgccuggcaggc

SEQ ID NO: 2563 - RNA, 20 nt, Artificial Sequence
  C3-targeting RNA guide sequence portion
ggagucaugguggcugcugu

SEQ ID NO: 2564 - RNA, 20 nt, Artificial Sequence
  C3-targeting RNA guide sequence portion
ggagugggcuugucauucca

SEQ ID NO: 2565 - RNA, 20 nt, Artificial Sequence
  C3-targeting RNA guide sequence portion
ggaguggggcacgggagugg

SEQ ID NO: 2566 - RNA, 20 nt, Artificial Sequence
  C3-targeting RNA guide sequence portion
ggaguguuuagagagguaga

SEQ ID NO: 2567 - RNA, 20 nt, Artificial Sequence
  C3-targeting RNA guide sequence portion
ggaguugcugacgcugguug

SEQ ID NO: 2568 - RNA, 20 nt, Artificial Sequence
  C3-targeting RNA guide sequence portion
ggaguuugaguguuuacaua

SEQ ID NO: 2569 - RNA, 20 nt, Artificial Sequence
  C3-targeting RNA guide sequence portion
ggaguuugcagcuuggggac

SEQ ID NO: 2570 - RNA, 20 nt, Artificial Sequence
  C3-targeting RNA guide sequence portion
ggaguuugggauguuucuag

SEQ ID NO: 2571 - RNA, 20 nt, Artificial Sequence
  C3-targeting RNA guide sequence portion
ggauccagugacugccggcg

SEQ ID NO: 2572 - RNA, 20 nt, Artificial Sequence
  C3-targeting RNA guide sequence portion
ggauccucuccaggaccaga

SEQ ID NO: 2573 - RNA, 20 nt, Artificial Sequence
  C3-targeting RNA guide sequence portion
ggaugugagacgccaguccu

SEQ ID NO: 2574 - RNA, 20 nt, Artificial Sequence
  C3-targeting RNA guide sequence portion
ggauguguggcccccucguu

SEQ ID NO: 2575 - RNA, 20 nt, Artificial Sequence
  C3-targeting RNA guide sequence portion
ggauguuucuagaauugagg

SEQ ID NO: 2576 - RNA, 20 nt, Artificial Sequence
  C3-targeting RNA guide sequence portion
ggauucagggguuagcaggu

SEQ ID NO: 2577 - RNA, 20 nt, Artificial Sequence
  C3-targeting RNA guide sequence portion
ggauuccacaaacacccaac

SEQ ID NO: 2578 - RNA, 20 nt, Artificial Sequence
  C3-targeting RNA guide sequence portion
ggcaacgagggggccacaca

SEQ ID NO: 2579 - RNA, 20 nt, Artificial Sequence
  C3-targeting RNA guide sequence portion
ggcaagugcgccggcaguca

SEQ ID NO: 2580 - RNA, 20 nt, Artificial Sequence
  C3-targeting RNA guide sequence portion
ggcacacagccugccaggcg

SEQ ID NO: 2581 - RNA, 20 nt, Artificial Sequence
  C3-targeting RNA guide sequence portion
ggcacgggagugggcuuguc

SEQ ID NO: 2582 - RNA, 20 nt, Artificial Sequence
  C3-targeting RNA guide sequence portion
ggcacugccaccgucucaac

SEQ ID NO: 2583 - RNA, 20 nt, Artificial Sequence
  C3-targeting RNA guide sequence portion
ggcagcccaaauauauauaa

SEQ ID NO: 2584 - RNA, 20 nt, Artificial Sequence
  C3-targeting RNA guide sequence portion
ggcaggacagcagccaccau

SEQ ID NO: 2585 - RNA, 20 nt, Artificial Sequence
  C3-targeting RNA guide sequence portion
ggcaggcugugugccccagc

SEQ ID NO: 2586 - RNA, 20 nt, Artificial Sequence
  C3-targeting RNA guide sequence portion
ggcagucacuggauccucuc

SEQ ID NO: 2587 - RNA, 20 nt, Artificial Sequence
  C3-targeting RNA guide sequence portion
ggcauguguggguuuaggcg

SEQ ID NO: 2588 - RNA, 20 nt, Artificial Sequence
  C3-targeting RNA guide sequence portion
ggcauuggcaagugcgccgg

SEQ ID NO: 2589 - RNA, 20 nt, Artificial Sequence
  C3-targeting RNA guide sequence portion
ggccacacaucccaccaaac

SEQ ID NO: 2590 - RNA, 20 nt, Artificial Sequence
  C3-targeting RNA guide sequence portion
ggccaggcccagcuggcuga

SEQ ID NO: 2591 - RNA, 20 nt, Artificial Sequence
  C3-targeting RNA guide sequence portion
ggcccagcuggcugagagug

SEQ ID NO: 2592 - RNA, 20 nt, Artificial Sequence
  C3-targeting RNA guide sequence portion
ggcccccucguugcccaggc

SEQ ID NO: 2593 - RNA, 20 nt, Artificial Sequence
  C3-targeting RNA guide sequence portion
ggccuggccuuugaaagccu

SEQ ID NO: 2594 - RNA, 20 nt, Artificial Sequence
  C3-targeting RNA guide sequence portion
ggccuuugaaagccugggca

SEQ ID NO: 2595 - RNA, 20 nt, Artificial Sequence
  C3-targeting RNA guide sequence portion
ggcgauugugggucuggaag

SEQ ID NO: 2596 - RNA, 20 nt, Artificial Sequence
  C3-targeting RNA guide sequence portion
ggcgcacuugccaaugccau

SEQ ID NO: 2597 - RNA, 20 nt, Artificial Sequence
  C3-targeting RNA guide sequence portion
ggcgcugacuccagugagga

SEQ ID NO: 2598 - RNA, 20 nt, Artificial Sequence
  C3-targeting RNA guide sequence portion
ggcguauguggguuugggua

SEQ ID NO: 2599 - RNA, 20 nt, Artificial Sequence
  C3-targeting RNA guide sequence portion
ggcgucucacauccguggaa

SEQ ID NO: 2600 - RNA, 20 nt, Artificial Sequence
  C3-targeting RNA guide sequence portion
ggcuacuucggguucaugua

SEQ ID NO: 2601 - RNA, 20 nt, Artificial Sequence
  C3-targeting RNA guide sequence portion
ggcugccugagaguuugggu

SEQ ID NO: 2602 - RNA, 20 nt, Artificial Sequence
  C3-targeting RNA guide sequence portion
ggcugcuguccugcccaugu

SEQ ID NO: 2603 - RNA, 20 nt, Artificial Sequence
  C3-targeting RNA guide sequence portion
ggcuggggcacacagccugc

SEQ ID NO: 2604 - RNA, 20 nt, Artificial Sequence
  C3-targeting RNA guide sequence portion
ggcuggguuuggggugcucu

SEQ ID NO: 2605 - RNA, 20 nt, Artificial Sequence
  C3-targeting RNA guide sequence portion
ggcugguucugggguggaag

SEQ ID NO: 2606 - RNA, 20 nt, Artificial Sequence
  C3-targeting RNA guide sequence portion
ggcugugugccccagccucu

SEQ ID NO: 2607 - RNA, 20 nt, Artificial Sequence
  C3-targeting RNA guide sequence portion
ggcuugucauuccacggaug

SEQ ID NO: 2608 - RNA, 20 nt, Artificial Sequence
  C3-targeting RNA guide sequence portion
ggcuuucaaaggccaggccc

SEQ ID NO: 2609 - RNA, 20 nt, Artificial Sequence
  C3-targeting RNA guide sequence portion
gggaaugauuauauauauuu

SEQ ID NO: 2610 - RNA, 20 nt, Artificial Sequence
  C3-targeting RNA guide sequence portion
gggaccuggacccccaaaug

SEQ ID NO: 2611 - RNA, 20 nt, Artificial Sequence
  C3-targeting RNA guide sequence portion
gggacuugcaauuuucagug

SEQ ID NO: 2612 - RNA, 20 nt, Artificial Sequence
  C3-targeting RNA guide sequence portion
gggagucaugguggcugcug

SEQ ID NO: 2613 - RNA, 20 nt, Artificial Sequence
  C3-targeting RNA guide sequence portion
gggagugggcuugucauucc

SEQ ID NO: 2614 - RNA, 20 nt, Artificial Sequence
  C3-targeting RNA guide sequence portion
gggaguuugaguguuuacau

SEQ ID NO: 2615 - RNA, 20 nt, Artificial Sequence
  C3-targeting RNA guide sequence portion
gggaguuugcagcuugggga

SEQ ID NO: 2616 - RNA, 20 nt, Artificial Sequence
  C3-targeting RNA guide sequence portion
gggauguguggcccccucgu

SEQ ID NO: 2617 - RNA, 20 nt, Artificial Sequence
  C3-targeting RNA guide sequence portion
gggauguuucuagaauugag

SEQ ID NO: 2618 - RNA, 20 nt, Artificial Sequence
  C3-targeting RNA guide sequence portion
gggcaacgagggggccacac

SEQ ID NO: 2619 - RNA, 20 nt, Artificial Sequence
  C3-targeting RNA guide sequence portion
gggcacacagccugccaggc

SEQ ID NO: 2620 - RNA, 20 nt, Artificial Sequence
  C3-targeting RNA guide sequence portion
gggcacgggagugggcuugu

SEQ ID NO: 2621 - RNA, 20 nt, Artificial Sequence
  C3-targeting RNA guide sequence portion
gggcacugccaccgucucaa

SEQ ID NO: 2622 - RNA, 20 nt, Artificial Sequence
  C3-targeting RNA guide sequence portion
gggcaggacagcagccacca

SEQ ID NO: 2623 - RNA, 20 nt, Artificial Sequence
  C3-targeting RNA guide sequence portion
gggcauguguggguuuaggc

SEQ ID NO: 2624 - RNA, 20 nt, Artificial Sequence
  C3-targeting RNA guide sequence portion
gggcauuuggaauugauugu

SEQ ID NO: 2625 - RNA, 20 nt, Artificial Sequence
  C3-targeting RNA guide sequence portion
gggccacacaucccaccaaa

SEQ ID NO: 2626 - RNA, 20 nt, Artificial Sequence
  C3-targeting RNA guide sequence portion
gggccuggccuuugaaagcc

SEQ ID NO: 2627 - RNA, 20 nt, Artificial Sequence
  C3-targeting RNA guide sequence portion
gggcugccugagaguuuggg

SEQ ID NO: 2628 - RNA, 20 nt, Artificial Sequence
  C3-targeting RNA guide sequence portion
gggcugguucugggguggaa

SEQ ID NO: 2629 - RNA, 20 nt, Artificial Sequence
  C3-targeting RNA guide sequence portion
gggcuugucauuccacggau

SEQ ID NO: 2630 - RNA, 20 nt, Artificial Sequence
  C3-targeting RNA guide sequence portion
ggggacuugcaauuuucagu

SEQ ID NO: 2631 - RNA, 20 nt, Artificial Sequence
  C3-targeting RNA guide sequence portion
ggggcacacagccugccagg

SEQ ID NO: 2632 - RNA, 20 nt, Artificial Sequence
  C3-targeting RNA guide sequence portion
ggggcacgggagugggcuug

SEQ ID NO: 2633 - RNA, 20 nt, Artificial Sequence
  C3-targeting RNA guide sequence portion
ggggcauguguggguuuagg

SEQ ID NO: 2634 - RNA, 20 nt, Artificial Sequence
  C3-targeting RNA guide sequence portion
ggggcauuuggaauugauug

SEQ ID NO: 2635 - RNA, 20 nt, Artificial Sequence
  C3-targeting RNA guide sequence portion
ggggccacacaucccaccaa

SEQ ID NO: 2636 - RNA, 20 nt, Artificial Sequence
  C3-targeting RNA guide sequence portion
gggggccacacaucccacca

SEQ ID NO: 2637 - RNA, 20 nt, Artificial Sequence
  C3-targeting RNA guide sequence portion
ggggguccaggucccuguag

SEQ ID NO: 2638 - RNA, 20 nt, Artificial Sequence
  C3-targeting RNA guide sequence portion
gggguccaggucccuguaga

SEQ ID NO: 2639 - RNA, 20 nt, Artificial Sequence
  C3-targeting RNA guide sequence portion
ggggugcucuaagauuugag

SEQ ID NO: 2640 - RNA, 20 nt, Artificial Sequence
  C3-targeting RNA guide sequence portion
gggguggaagcagacauuug

SEQ ID NO: 2641 - RNA, 20 nt, Artificial Sequence
  C3-targeting RNA guide sequence portion
gggguguuggagguuuaggc

SEQ ID NO: 2642 - RNA, 20 nt, Artificial Sequence
  C3-targeting RNA guide sequence portion
gggguuagcagguugggaau

SEQ ID NO: 2643 - RNA, 20 nt, Artificial Sequence
  C3-targeting RNA guide sequence portion
ggguagguagaguugagggu

SEQ ID NO: 2644 - RNA, 20 nt, Artificial Sequence
  C3-targeting RNA guide sequence portion
ggguccaggucccuguagaa

SEQ ID NO: 2645 - RNA, 20 nt, Artificial Sequence
  C3-targeting RNA guide sequence portion
gggucuggaaguccagagac

SEQ ID NO: 2646 - RNA, 20 nt, Artificial Sequence
  C3-targeting RNA guide sequence portion
gggugcauuuggguguuugu

SEQ ID NO: 2647 - RNA, 20 nt, Artificial Sequence
  C3-targeting RNA guide sequence portion
gggugcucuaagauuugagg

SEQ ID NO: 2648 - RNA, 20 nt, Artificial Sequence
  C3-targeting RNA guide sequence portion
ggguggaagcagacauuugg

SEQ ID NO: 2649 - RNA, 20 nt, Artificial Sequence
  C3-targeting RNA guide sequence portion
ggguguaugugguguucauu

SEQ ID NO: 2650 - RNA, 20 nt, Artificial Sequence
  C3-targeting RNA guide sequence portion
ggguguccgggaguuugagu

SEQ ID NO: 2651 - RNA, 20 nt, Artificial Sequence
  C3-targeting RNA guide sequence portion
ggguguuggagguuuaggcu

SEQ ID NO: 2652 - RNA, 20 nt, Artificial Sequence
  C3-targeting RNA guide sequence portion
ggguguuuauggguugggug

SEQ ID NO: 2653 - RNA, 20 nt, Artificial Sequence
  C3-targeting RNA guide sequence portion
ggguguuuguggaauccagg

SEQ ID NO: 2654 - RNA, 20 nt, Artificial Sequence
  C3-targeting RNA guide sequence portion
ggguguuuguggauucaggg

SEQ ID NO: 2655 - RNA, 20 nt, Artificial Sequence
  C3-targeting RNA guide sequence portion
ggguuagcagguugggaaug

SEQ ID NO: 2656 - RNA, 20 nt, Artificial Sequence
  C3-targeting RNA guide sequence portion
ggguucauguauaguugggg

SEQ ID NO: 2657 - RNA, 20 nt, Artificial Sequence
  C3-targeting RNA guide sequence portion
ggguuggguguuuguggaau

SEQ ID NO: 2658 - RNA, 20 nt, Artificial Sequence
  C3-targeting RNA guide sequence portion
ggguuuaaagauuggcuacu

SEQ ID NO: 2659 - RNA, 20 nt, Artificial Sequence
  C3-targeting RNA guide sequence portion
ggguuuaggcgauugugggu

SEQ ID NO: 2660 - RNA, 20 nt, Artificial Sequence
  C3-targeting RNA guide sequence portion
ggguuuggggcauguguggg

SEQ ID NO: 2661 - RNA, 20 nt, Artificial Sequence
  C3-targeting RNA guide sequence portion
ggguuuggggugcucuaaga

SEQ ID NO: 2662 - RNA, 20 nt, Artificial Sequence
  C3-targeting RNA guide sequence portion
ggguuuggguagguagaguu

SEQ ID NO: 2663 - RNA, 20 nt, Artificial Sequence
  C3-targeting RNA guide sequence portion
ggguuuggugggaugugugg

SEQ ID NO: 2664 - RNA, 20 nt, Artificial Sequence
  C3-targeting RNA guide sequence portion
gguagagguuuaggguuugg

SEQ ID NO: 2665 - RNA, 20 nt, Artificial Sequence
  C3-targeting RNA guide sequence portion
gguagaguugaggguguccg

SEQ ID NO: 2666 - RNA, 20 nt, Artificial Sequence
  C3-targeting RNA guide sequence portion
gguagguagaguugagggug

SEQ ID NO: 2667 - RNA, 20 nt, Artificial Sequence
  C3-targeting RNA guide sequence portion
gguaucauggaauuggaguu

SEQ ID NO: 2668 - RNA, 20 nt, Artificial Sequence
  C3-targeting RNA guide sequence portion
gguaucguggaauuggaguu

SEQ ID NO: 2669 - RNA, 20 nt, Artificial Sequence
  C3-targeting RNA guide sequence portion
gguaugguggaauuggaguu

SEQ ID NO: 2670 - RNA, 20 nt, Artificial Sequence
  C3-targeting RNA guide sequence portion
ggucaucuguugguuuaggg

SEQ ID NO: 2671 - RNA, 20 nt, Artificial Sequence
  C3-targeting RNA guide sequence portion
gguccaggucccuguagaau

SEQ ID NO: 2672 - RNA, 20 nt, Artificial Sequence
  C3-targeting RNA guide sequence portion
ggucccuguagaauucaggg

SEQ ID NO: 2673 - RNA, 20 nt, Artificial Sequence
  C3-targeting RNA guide sequence portion
gguccuggagaggauccagu

SEQ ID NO: 2674 - RNA, 20 nt, Artificial Sequence
  C3-targeting RNA guide sequence portion
ggucuggaaguccagagacu

SEQ ID NO: 2675 - RNA, 20 nt, Artificial Sequence
  C3-targeting RNA guide sequence portion
ggugcauuuggguguuugug

SEQ ID NO: 2676 - RNA, 20 nt, Artificial Sequence
  C3-targeting RNA guide sequence portion
ggugcucuaagauuugaggu

SEQ ID NO: 2677 - RNA, 20 nt, Artificial Sequence
  C3-targeting RNA guide sequence portion
gguggaagcagacauuuggg

SEQ ID NO: 2678 - RNA, 20 nt, Artificial Sequence
  C3-targeting RNA guide sequence portion
gguggaauuggaguuuggga

SEQ ID NO: 2679 - RNA, 20 nt, Artificial Sequence
  C3-targeting RNA guide sequence portion
gguggcagugcccagagaag

SEQ ID NO: 2680 - RNA, 20 nt, Artificial Sequence
  C3-targeting RNA guide sequence portion
gguggcugcuguccugccca

SEQ ID NO: 2681 - RNA, 20 nt, Artificial Sequence
  C3-targeting RNA guide sequence portion
ggugggauguguggcccccu

SEQ ID NO: 2682 - RNA, 20 nt, Artificial Sequence
  C3-targeting RNA guide sequence portion
gguguaugugguguucauug

SEQ ID NO: 2683 - RNA, 20 nt, Artificial Sequence
  C3-targeting RNA guide sequence portion
gguguccgggaguuugagug

SEQ ID NO: 2684 - RNA, 20 nt, Artificial Sequence
  C3-targeting RNA guide sequence portion
gguguucauugauggugcgg

SEQ ID NO: 2685 - RNA, 20 nt, Artificial Sequence
  C3-targeting RNA guide sequence portion
gguguuggagguuuaggcug

SEQ ID NO: 2686 - RNA, 20 nt, Artificial Sequence
  C3-targeting RNA guide sequence portion
gguguuuauggguugggugu

SEQ ID NO: 2687 - RNA, 20 nt, Artificial Sequence
  C3-targeting RNA guide sequence portion
gguguuuguggaauccaggu

SEQ ID NO: 2688 - RNA, 20 nt, Artificial Sequence
  C3-targeting RNA guide sequence portion
gguguuuguggauucagggg

SEQ ID NO: 2689 - RNA, 20 nt, Artificial Sequence
  C3-targeting RNA guide sequence portion
gguuagcagguugggaauga

SEQ ID NO: 2690 - RNA, 20 nt, Artificial Sequence
  C3-targeting RNA guide sequence portion
gguuaugacucuacccacaa

SEQ ID NO: 2691 - RNA, 20 nt, Artificial Sequence
  C3-targeting RNA guide sequence portion
gguucaggguuuggugggau

SEQ ID NO: 2692 - RNA, 20 nt, Artificial Sequence
  C3-targeting RNA guide sequence portion
gguucauguauaguuggggc

SEQ ID NO: 2693 - RNA, 20 nt, Artificial Sequence
  C3-targeting RNA guide sequence portion
gguucugggguggaagcaga

SEQ ID NO: 2694 - RNA, 20 nt, Artificial Sequence
  C3-targeting RNA guide sequence portion
gguugagacgguggcagugc

SEQ ID NO: 2695 - RNA, 20 nt, Artificial Sequence
  C3-targeting RNA guide sequence portion
gguuggaagguucaggguuu

SEQ ID NO: 2696 - RNA, 20 nt, Artificial Sequence
  C3-targeting RNA guide sequence portion
gguugggaaugauuauauau

SEQ ID NO: 2697 - RNA, 20 nt, Artificial Sequence
  C3-targeting RNA guide sequence portion
gguuuaaagauuggcuacuu

SEQ ID NO: 2698 - RNA, 20 nt, Artificial Sequence
  C3-targeting RNA guide sequence portion
gguuuagagguuuuggcgua

SEQ ID NO: 2699 - RNA, 20 nt, Artificial Sequence
  C3-targeting RNA guide sequence portion
gguuuaggcgauuguggguc

SEQ ID NO: 2700 - RNA, 20 nt, Artificial Sequence
  C3-targeting RNA guide sequence portion
gguuuaggcuggguuugggg

SEQ ID NO: 2701 - RNA, 20 nt, Artificial Sequence
  C3-targeting RNA guide sequence portion
gguuuaggguguauguggug

SEQ ID NO: 2702 - RNA, 20 nt, Artificial Sequence
  C3-targeting RNA guide sequence portion
gguuuaggguuuggggcaug

SEQ ID NO: 2703 - RNA, 20 nt, Artificial Sequence
  C3-targeting RNA guide sequence portion
gguuuggacuuuacaagauu

SEQ ID NO: 2704 - RNA, 20 nt, Artificial Sequence
  C3-targeting RNA guide sequence portion
gguuuggggcaugugugggu

SEQ ID NO: 2705 - RNA, 20 nt, Artificial Sequence
  C3-targeting RNA guide sequence portion
gguuuggggugcucuaagau

SEQ ID NO: 2706 - RNA, 20 nt, Artificial Sequence
  C3-targeting RNA guide sequence portion
gguuuggguagguagaguug

SEQ ID NO: 2707 - RNA, 20 nt, Artificial Sequence
  C3-targeting RNA guide sequence portion
gguuuggugggauguguggc

SEQ ID NO: 2708 - RNA, 20 nt, Artificial Sequence
  C3-targeting RNA guide sequence portion
gguuuuggcguauguggguu

SEQ ID NO: 2709 - RNA, 20 nt, Artificial Sequence
  C3-targeting RNA guide sequence portion
guaaacacucaaacucccgg

SEQ ID NO: 2710 - RNA, 20 nt, Artificial Sequence
  C3-targeting RNA guide sequence portion
guaaaguccaaaccuccgag

SEQ ID NO: 2711 - RNA, 20 nt, Artificial Sequence
  C3-targeting RNA guide sequence portion
guagaauucagggugcauuu

SEQ ID NO: 2712 - RNA, 20 nt, Artificial Sequence
  C3-targeting RNA guide sequence portion
guagagguuuaggguuuggg

SEQ ID NO: 2713 - RNA, 20 nt, Artificial Sequence
  C3-targeting RNA guide sequence portion
guagaguugaggguguccgg

SEQ ID NO: 2714 - RNA, 20 nt, Artificial Sequence
  C3-targeting RNA guide sequence portion
guagccaaucuuuaaaccca

SEQ ID NO: 2715 - RNA, 20 nt, Artificial Sequence
  C3-targeting RNA guide sequence portion
guagguagaguugagggugu

SEQ ID NO: 2716 - RNA, 20 nt, Artificial Sequence
  C3-targeting RNA guide sequence portion
guauaguuggggcauuugga

SEQ ID NO: 2717 - RNA, 20 nt, Artificial Sequence
  C3-targeting RNA guide sequence portion
guauauaaacuccaauucca

SEQ ID NO: 2718 - RNA, 20 nt, Artificial Sequence
  C3-targeting RNA guide sequence portion
guaucauggaauuggaguuu

SEQ ID NO: 2719 - RNA, 20 nt, Artificial Sequence
  C3-targeting RNA guide sequence portion
guaucguggaauuggaguuu

SEQ ID NO: 2720 - RNA, 20 nt, Artificial Sequence
  C3-targeting RNA guide sequence portion
guaugguggaauuggaguuu

SEQ ID NO: 2721 - RNA, 20 nt, Artificial Sequence
  C3-targeting RNA guide sequence portion
guauguggguuuggguaggu

SEQ ID NO: 2722 - RNA, 20 nt, Artificial Sequence
  C3-targeting RNA guide sequence portion
guaugugguguucauugaug

SEQ ID NO: 2723 - RNA, 20 nt, Artificial Sequence
  C3-targeting RNA guide sequence portion
guauuuauuaggacuggggu

SEQ ID NO: 2724 - RNA, 20 nt, Artificial Sequence
  C3-targeting RNA guide sequence portion
gucacuggauccucuccagg

SEQ ID NO: 2725 - RNA, 20 nt, Artificial Sequence
  C3-targeting RNA guide sequence portion
gucagcaacuccuccaaguc

SEQ ID NO: 2726 - RNA, 20 nt, Artificial Sequence
  C3-targeting RNA guide sequence portion
gucagcgccuggcaggcugu

SEQ ID NO: 2727 - RNA, 20 nt, Artificial Sequence
  C3-targeting RNA guide sequence portion
gucaucuguugguuuagggu

SEQ ID NO: 2728 - RNA, 20 nt, Artificial Sequence
  C3-targeting RNA guide sequence portion
gucaugguggcugcuguccu

SEQ ID NO: 2729 - RNA, 20 nt, Artificial Sequence
  C3-targeting RNA guide sequence portion
gucauuccacggaugugaga

SEQ ID NO: 2730 - RNA, 20 nt, Artificial Sequence
  C3-targeting RNA guide sequence portion
guccagagacuuggaggagu

SEQ ID NO: 2731 - RNA, 20 nt, Artificial Sequence
  C3-targeting RNA guide sequence portion
guccaggucccuguagaauu

SEQ ID NO: 2732 - RNA, 20 nt, Artificial Sequence
  C3-targeting RNA guide sequence portion
guccccaagcugcaaacucc

SEQ ID NO: 2733 - RNA, 20 nt, Artificial Sequence
  C3-targeting RNA guide sequence portion
gucccuguagaauucagggu

SEQ ID NO: 2734 - RNA, 20 nt, Artificial Sequence
  C3-targeting RNA guide sequence portion
guccgggaguuugaguguuu

SEQ ID NO: 2735 - RNA, 20 nt, Artificial Sequence
  C3-targeting RNA guide sequence portion
guccucacuggagucagcgc

SEQ ID NO: 2736 - RNA, 20 nt, Artificial Sequence
  C3-targeting RNA guide sequence portion
guccugcccaugugguugag

SEQ ID NO: 2737 - RNA, 20 nt, Artificial Sequence
  C3-targeting RNA guide sequence portion
guccuggagaggauccagug

SEQ ID NO: 2738 - RNA, 20 nt, Artificial Sequence
  C3-targeting RNA guide sequence portion
gucggaguggggcacgggag

SEQ ID NO: 2739 - RNA, 20 nt, Artificial Sequence
  C3-targeting RNA guide sequence portion
gucucaaccacaugggcagg

SEQ ID NO: 2740 - RNA, 20 nt, Artificial Sequence
  C3-targeting RNA guide sequence portion
gucucacauccguggaauga

SEQ ID NO: 2741 - RNA, 20 nt, Artificial Sequence
  C3-targeting RNA guide sequence portion
gucucuggacuuccagaccc

SEQ ID NO: 2742 - RNA, 20 nt, Artificial Sequence
  C3-targeting RNA guide sequence portion
gucugcuuccaccccagaac

SEQ ID NO: 2743 - RNA, 20 nt, Artificial Sequence
  C3-targeting RNA guide sequence portion
gucuggaaguccagagacuu

SEQ ID NO: 2744 - RNA, 20 nt, Artificial Sequence
  C3-targeting RNA guide sequence portion
gugacugccggcgcacuugc

SEQ ID NO: 2745 - RNA, 20 nt, Artificial Sequence
  C3-targeting RNA guide sequence portion
gugagacgccaguccucacu

SEQ ID NO: 2746 - RNA, 20 nt, Artificial Sequence
  C3-targeting RNA guide sequence portion
gugaggacuggcgucucaca

SEQ ID NO: 2747 - RNA, 20 nt, Artificial Sequence
  C3-targeting RNA guide sequence portion
gugagugguuaugacucuac

SEQ ID NO: 2748 - RNA, 20 nt, Artificial Sequence
  C3-targeting RNA guide sequence portion
gugcauuuggguguuugugg

SEQ ID NO: 2749 - RNA, 20 nt, Artificial Sequence
  C3-targeting RNA guide sequence portion
gugcccagagaagauaaugg

SEQ ID NO: 2750 - RNA, 20 nt, Artificial Sequence
  C3-targeting RNA guide sequence portion
gugccccagccucugguccu

SEQ ID NO: 2751 - RNA, 20 nt, Artificial Sequence
  C3-targeting RNA guide sequence portion
gugcgccggcagucacugga

SEQ ID NO: 2752 - RNA, 20 nt, Artificial Sequence
  C3-targeting RNA guide sequence portion
gugcucuaagauuugagguu

SEQ ID NO: 2753 - RNA, 20 nt, Artificial Sequence
  C3-targeting RNA guide sequence portion
guggaagcagacauuugggg

SEQ ID NO: 2754 - RNA, 20 nt, Artificial Sequence
  C3-targeting RNA guide sequence portion
guggaauccagguaucaugg

SEQ ID NO: 2755 - RNA, 20 nt, Artificial Sequence
  C3-targeting RNA guide sequence portion
guggaauccagguaucgugg

SEQ ID NO: 2756 - RNA, 20 nt, Artificial Sequence
  C3-targeting RNA guide sequence portion
guggaauccagguauggugg

SEQ ID NO: 2757 - RNA, 20 nt, Artificial Sequence
  C3-targeting RNA guide sequence portion
guggaaugacaagcccacuc

SEQ ID NO: 2758 - RNA, 20 nt, Artificial Sequence
  C3-targeting RNA guide sequence portion
guggaauuggaguuuauaua

SEQ ID NO: 2759 - RNA, 20 nt, Artificial Sequence
  C3-targeting RNA guide sequence portion
guggaauuggaguuugggau

SEQ ID NO: 2760 - RNA, 20 nt, Artificial Sequence
  C3-targeting RNA guide sequence portion
guggauucagggguuagcag

SEQ ID NO: 2761 - RNA, 20 nt, Artificial Sequence
  C3-targeting RNA guide sequence portion
guggcagugcccagagaaga

SEQ ID NO: 2762 - RNA, 20 nt, Artificial Sequence
  C3-targeting RNA guide sequence portion
guggcccccucguugcccag

SEQ ID NO: 2763 - RNA, 20 nt, Artificial Sequence
  C3-targeting RNA guide sequence portion
guggcugcuguccugcccau

SEQ ID NO: 2764 - RNA, 20 nt, Artificial Sequence
  C3-targeting RNA guide sequence portion
gugggagucaugguggcugc

SEQ ID NO: 2765 - RNA, 20 nt, Artificial Sequence
  C3-targeting RNA guide sequence portion
gugggauguguggcccccuc

SEQ ID NO: 2766 - RNA, 20 nt, Artificial Sequence
  C3-targeting RNA guide sequence portion
gugggcuugucauuccacgg

SEQ ID NO: 2767 - RNA, 20 nt, Artificial Sequence
  C3-targeting RNA guide sequence portion
guggggcacgggagugggcu

SEQ ID NO: 2768 - RNA, 20 nt, Artificial Sequence
  C3-targeting RNA guide sequence portion
gugggucuggaaguccagag

SEQ ID NO: 2769 - RNA, 20 nt, Artificial Sequence
  C3-targeting RNA guide sequence portion
guggguuuaaagauuggcua

SEQ ID NO: 2770 - RNA, 20 nt, Artificial Sequence
  C3-targeting RNA guide sequence portion
guggguuuaggcgauugugg

SEQ ID NO: 2771 - RNA, 20 nt, Artificial Sequence
  C3-targeting RNA guide sequence portion
guggguuuggguagguagag

SEQ ID NO: 2772 - RNA, 20 nt, Artificial Sequence
  C3-targeting RNA guide sequence portion
gugguguucauugauggugc

SEQ ID NO: 2773 - RNA, 20 nt, Artificial Sequence
  C3-targeting RNA guide sequence portion
gugguuaugacucuacccac

SEQ ID NO: 2774 - RNA, 20 nt, Artificial Sequence
  C3-targeting RNA guide sequence portion
gugguugagacgguggcagu

SEQ ID NO: 2775 - RNA, 20 nt, Artificial Sequence
  C3-targeting RNA guide sequence portion
guguaugugguguucauuga

SEQ ID NO: 2776 - RNA, 20 nt, Artificial Sequence
  C3-targeting RNA guide sequence portion
guguccgggaguuugagugu

SEQ ID NO: 2777 - RNA, 20 nt, Artificial Sequence
  C3-targeting RNA guide sequence portion
gugugccccagccucugguc

SEQ ID NO: 2778 - RNA, 20 nt, Artificial Sequence
  C3-targeting RNA guide sequence portion
guguggcccccucguugccc

SEQ ID NO: 2779 - RNA, 20 nt, Artificial Sequence
  C3-targeting RNA guide sequence portion
guguggguuuaaagauuggc

SEQ ID NO: 2780 - RNA, 20 nt, Artificial Sequence
  C3-targeting RNA guide sequence portion
guguggguuuaggcgauugu

SEQ ID NO: 2781 - RNA, 20 nt, Artificial Sequence
  C3-targeting RNA guide sequence portion
guguuggagguuuaggcugg

SEQ ID NO: 2782 - RNA, 20 nt, Artificial Sequence
  C3-targeting RNA guide sequence portion
guguuuacauauuuggagug

SEQ ID NO: 2783 - RNA, 20 nt, Artificial Sequence
  C3-targeting RNA guide sequence portion
guguuuagagagguagaggu

SEQ ID NO: 2784 - RNA, 20 nt, Artificial Sequence
  C3-targeting RNA guide sequence portion
guguuuauggguuggguguu

SEQ ID NO: 2785 - RNA, 20 nt, Artificial Sequence
  C3-targeting RNA guide sequence portion
guguuuguggaauccaggua

SEQ ID NO: 2786 - RNA, 20 nt, Artificial Sequence
  C3-targeting RNA guide sequence portion
guguuuguggauucaggggu

SEQ ID NO: 2787 - RNA, 20 nt, Artificial Sequence
  C3-targeting RNA guide sequence portion
guuagcagguugggaaugau

SEQ ID NO: 2788 - RNA, 20 nt, Artificial Sequence
  C3-targeting RNA guide sequence portion
guuaugacucuacccacaaa

SEQ ID NO: 2789 - RNA, 20 nt, Artificial Sequence
  C3-targeting RNA guide sequence portion
guucaggguuuggugggaug

SEQ ID NO: 2790 - RNA, 20 nt, Artificial Sequence
  C3-targeting RNA guide sequence portion
guucauguauaguuggggca

SEQ ID NO: 2791 - RNA, 20 nt, Artificial Sequence
  C3-targeting RNA guide sequence portion
guucugggguggaagcagac

SEQ ID NO: 2792 - RNA, 20 nt, Artificial Sequence
  C3-targeting RNA guide sequence portion
guugagacgguggcagugcc

SEQ ID NO: 2793 - RNA, 20 nt, Artificial Sequence
  C3-targeting RNA guide sequence portion
guugaggguguccgggaguu

SEQ ID NO: 2794 - RNA, 20 nt, Artificial Sequence
  C3-targeting RNA guide sequence portion
guugcccaggcuuucaaagg

SEQ ID NO: 2795 - RNA, 20 nt, Artificial Sequence
  C3-targeting RNA guide sequence portion
guugcugacgcugguuggaa

SEQ ID NO: 2796 - RNA, 20 nt, Artificial Sequence
  C3-targeting RNA guide sequence portion
guuggaagguucaggguuug

SEQ ID NO: 2797 - RNA, 20 nt, Artificial Sequence
  C3-targeting RNA guide sequence portion
guuggagguuuaggcugggu

SEQ ID NO: 2798 - RNA, 20 nt, Artificial Sequence
  C3-targeting RNA guide sequence portion
guugggaaugauuauauaua

SEQ ID NO: 2799 - RNA, 20 nt, Artificial Sequence
  C3-targeting RNA guide sequence portion
guuggggcauuuggaauuga

SEQ ID NO: 2800 - RNA, 20 nt, Artificial Sequence
  C3-targeting RNA guide sequence portion
guugguuuaggguguaugug

SEQ ID NO: 2801 - RNA, 20 nt, Artificial Sequence
  C3-targeting RNA guide sequence portion
guuuaaagauuggcuacuuc

SEQ ID NO: 2802 - RNA, 20 nt, Artificial Sequence
  C3-targeting RNA guide sequence portion
guuuacauauuuggaguguu

SEQ ID NO: 2803 - RNA, 20 nt, Artificial Sequence
  C3-targeting RNA guide sequence portion
guuuagagagguagagguuu

SEQ ID NO: 2804 - RNA, 20 nt, Artificial Sequence
  C3-targeting RNA guide sequence portion
guuuagagguuuuggcguau

SEQ ID NO: 2805 - RNA, 20 nt, Artificial Sequence
  C3-targeting RNA guide sequence portion
guuuaggcgauugugggucu

SEQ ID NO: 2806 - RNA, 20 nt, Artificial Sequence
  C3-targeting RNA guide sequence portion
guuuaggcuggguuuggggu

SEQ ID NO: 2807 - RNA, 20 nt, Artificial Sequence
  C3-targeting RNA guide sequence portion
guuuaggguguauguggugu

SEQ ID NO: 2808 - RNA, 20 nt, Artificial Sequence
  C3-targeting RNA guide sequence portion
guuuaggguuuggggcaugu

SEQ ID NO: 2809 - RNA, 20 nt, Artificial Sequence
  C3-targeting RNA guide sequence portion
guuuauauacauuugggcug

SEQ ID NO: 2810 - RNA, 20 nt, Artificial Sequence
  C3-targeting RNA guide sequence portion
guuuauggguuggguguuug

SEQ ID NO: 2811 - RNA, 20 nt, Artificial Sequence
  C3-targeting RNA guide sequence portion
guuucuagaauugaggucau

SEQ ID NO: 2812 - RNA, 20 nt, Artificial Sequence
  C3-targeting RNA guide sequence portion
guuugaguguuuacauauuu

SEQ ID NO: 2813 - RNA, 20 nt, Artificial Sequence
  C3-targeting RNA guide sequence portion
guuugcagcuuggggacuug

SEQ ID NO: 2814 - RNA, 20 nt, Artificial Sequence
  C3-targeting RNA guide sequence portion
guuuggacuuuacaagauuu

SEQ ID NO: 2815 - RNA, 20 nt, Artificial Sequence
  C3-targeting RNA guide sequence portion
guuugggauguuucuagaau

SEQ ID NO: 2816 - RNA, 20 nt, Artificial Sequence
  C3-targeting RNA guide sequence portion
guuuggggcauguguggguu

SEQ ID NO: 2817 - RNA, 20 nt, Artificial Sequence
  C3-targeting RNA guide sequence portion
guuuggggugcucuaagauu

SEQ ID NO: 2818 - RNA, 20 nt, Artificial Sequence
  C3-targeting RNA guide sequence portion
guuuggguagguagaguuga

SEQ ID NO: 2819 - RNA, 20 nt, Artificial Sequence
  C3-targeting RNA guide sequence portion
guuuggguguuuauggguug

SEQ ID NO: 2820 - RNA, 20 nt, Artificial Sequence
  C3-targeting RNA guide sequence portion
guuuggugggauguguggcc

SEQ ID NO: 2821 - RNA, 20 nt, Artificial Sequence
  C3-targeting RNA guide sequence portion
guuuguggaauccagguauc

SEQ ID NO: 2822 - RNA, 20 nt, Artificial Sequence
  C3-targeting RNA guide sequence portion
guuuguggaauccagguaug

SEQ ID NO: 2823 - RNA, 20 nt, Artificial Sequence
  C3-targeting RNA guide sequence portion
guuuguggauucagggguua

SEQ ID NO: 2824 - RNA, 20 nt, Artificial Sequence
  C3-targeting RNA guide sequence portion
guuuguggguagagucauaa

SEQ ID NO: 2825 - RNA, 20 nt, Artificial Sequence
  C3-targeting RNA guide sequence portion
guuuuggcguauguggguuu

SEQ ID NO: 2826 - RNA, 20 nt, Artificial Sequence
  C3-targeting RNA guide sequence portion
uaaacacccaaacucucagg

SEQ ID NO: 2827 - RNA, 20 nt, Artificial Sequence
  C3-targeting RNA guide sequence portion
uaaacacucaaacucccgga

SEQ ID NO: 2828 - RNA, 20 nt, Artificial Sequence
  C3-targeting RNA guide sequence portion
uaaacacuccaaauauguaa

SEQ ID NO: 2829 - RNA, 20 nt, Artificial Sequence
  C3-targeting RNA guide sequence portion
uaaaccaacagaugaccuca

SEQ ID NO: 2830 - RNA, 20 nt, Artificial Sequence
  C3-targeting RNA guide sequence portion
uaaacccacacaugccccaa

SEQ ID NO: 2831 - RNA, 20 nt, Artificial Sequence
  C3-targeting RNA guide sequence portion
uaaacccacacugaaaauug

SEQ ID NO: 2832 - RNA, 20 nt, Artificial Sequence
  C3-targeting RNA guide sequence portion
uaaaccucaaaucuuagagc

SEQ ID NO: 2833 - RNA, 20 nt, Artificial Sequence
  C3-targeting RNA guide sequence portion
uaaaccuccaacaccccagu

SEQ ID NO: 2834 - RNA, 20 nt, Artificial Sequence
  C3-targeting RNA guide sequence portion
uaaaccucuaccucucuaaa

SEQ ID NO: 2835 - RNA, 20 nt, Artificial Sequence
  C3-targeting RNA guide sequence portion
uaaacuccaauuccacgaua

SEQ ID NO: 2836 - RNA, 20 nt, Artificial Sequence
  C3-targeting RNA guide sequence portion
uaaacuccaauuccaugaua

SEQ ID NO: 2837 - RNA, 20 nt, Artificial Sequence
  C3-targeting RNA guide sequence portion
uaaagauuggcuacuucggg

SEQ ID NO: 2838 - RNA, 20 nt, Artificial Sequence
  C3-targeting RNA guide sequence portion
uaaaguccaaaccuccgagu

SEQ ID NO: 2839 - RNA, 20 nt, Artificial Sequence
  C3-targeting RNA guide sequence portion
uaaauacaaucaauuccaaa

SEQ ID NO: 2840 - RNA, 20 nt, Artificial Sequence
  C3-targeting RNA guide sequence portion
uaaccccugaauccacaaac

SEQ ID NO: 2841 - RNA, 20 nt, Artificial Sequence
  C3-targeting RNA guide sequence portion
uaagauuugagguuuagagg

SEQ ID NO: 2842 - RNA, 20 nt, Artificial Sequence
  C3-targeting RNA guide sequence portion
uaaucauucccaaccugcua

SEQ ID NO: 2843 - RNA, 20 nt, Artificial Sequence
  C3-targeting RNA guide sequence portion
uaauggcauuggcaagugcg

SEQ ID NO: 2844 - RNA, 20 nt, Artificial Sequence
  C3-targeting RNA guide sequence portion
uacaagauuugggaguuugc

SEQ ID NO: 2845 - RNA, 20 nt, Artificial Sequence
  C3-targeting RNA guide sequence portion
uacaaucaauuccaaaugcc

SEQ ID NO: 2846 - RNA, 20 nt, Artificial Sequence
  C3-targeting RNA guide sequence portion
uacacccuaaaccaacagau

SEQ ID NO: 2847 - RNA, 20 nt, Artificial Sequence
  C3-targeting RNA guide sequence portion
uacagggaccuggaccccca

SEQ ID NO: 2848 - RNA, 20 nt, Artificial Sequence
  C3-targeting RNA guide sequence portion
uacauauuuggaguguuuag

SEQ ID NO: 2849 - RNA, 20 nt, Artificial Sequence
  C3-targeting RNA guide sequence portion
uacaugaacccgaaguagcc

SEQ ID NO: 2850 - RNA, 20 nt, Artificial Sequence
  C3-targeting RNA guide sequence portion
uacauuugggcugccugaga

SEQ ID NO: 2851 - RNA, 20 nt, Artificial Sequence
  C3-targeting RNA guide sequence portion
uacauuugggcugccuguga

SEQ ID NO: 2852 - RNA, 20 nt, Artificial Sequence
  C3-targeting RNA guide sequence portion
uacccaaacccacauacgcc

SEQ ID NO: 2853 - RNA, 20 nt, Artificial Sequence
  C3-targeting RNA guide sequence portion
uacccacaaacagggcuggu

SEQ ID NO: 2854 - RNA, 20 nt, Artificial Sequence
  C3-targeting RNA guide sequence portion
uaccuacccaaacccacaua

SEQ ID NO: 2855 - RNA, 20 nt, Artificial Sequence
  C3-targeting RNA guide sequence portion
uaccucucuaaacacuccaa

SEQ ID NO: 2856 - RNA, 20 nt, Artificial Sequence
  C3-targeting RNA guide sequence portion
uacgccaaaaccucuaaacc

SEQ ID NO: 2857 - RNA, 20 nt, Artificial Sequence
  C3-targeting RNA guide sequence portion
uacuucggguucauguauag

SEQ ID NO: 2858 - RNA, 20 nt, Artificial Sequence
  C3-targeting RNA guide sequence portion
uagaaacaucccaaacucca

SEQ ID NO: 2859 - RNA, 20 nt, Artificial Sequence
  C3-targeting RNA guide sequence portion
uagaauucagggugcauuug

SEQ ID NO: 2860 - RNA, 20 nt, Artificial Sequence
  C3-targeting RNA guide sequence portion
uagaauugaggucaucuguu

SEQ ID NO: 2861 - RNA, 20 nt, Artificial Sequence
  C3-targeting RNA guide sequence portion
uagagagguagagguuuagg

SEQ ID NO: 2862 - RNA, 20 nt, Artificial Sequence
  C3-targeting RNA guide sequence portion
uagagcaccccaaacccagc

SEQ ID NO: 2863 - RNA, 20 nt, Artificial Sequence
  C3-targeting RNA guide sequence portion
uagagguuuaggguuugggg

SEQ ID NO: 2864 - RNA, 20 nt, Artificial Sequence
  C3-targeting RNA guide sequence portion
uagagguuuuggcguaugug

SEQ ID NO: 2865 - RNA, 20 nt, Artificial Sequence
  C3-targeting RNA guide sequence portion
uagaguugaggguguccggg

SEQ ID NO: 2866 - RNA, 20 nt, Artificial Sequence
  C3-targeting RNA guide sequence portion
uagcagguugggaaugauua

SEQ ID NO: 2867 - RNA, 20 nt, Artificial Sequence
  C3-targeting RNA guide sequence portion
uagccaaucuuuaaacccac

SEQ ID NO: 2868 - RNA, 20 nt, Artificial Sequence
  C3-targeting RNA guide sequence portion
uaggacugggguguuggagg

SEQ ID NO: 2869 - RNA, 20 nt, Artificial Sequence
  C3-targeting RNA guide sequence portion
uaggcgauugugggucugga

SEQ ID NO: 2870 - RNA, 20 nt, Artificial Sequence
  C3-targeting RNA guide sequence portion
uaggcuggguuuggggugcu

SEQ ID NO: 2871 - RNA, 20 nt, Artificial Sequence
  C3-targeting RNA guide sequence portion
uaggguguaugugguguuca

SEQ ID NO: 2872 - RNA, 20 nt, Artificial Sequence
  C3-targeting RNA guide sequence portion
uaggguuuggggcaugugug

SEQ ID NO: 2873 - RNA, 20 nt, Artificial Sequence
  C3-targeting RNA guide sequence portion
uagguagaguugaggguguc

SEQ ID NO: 2874 - RNA, 20 nt, Artificial Sequence
  C3-targeting RNA guide sequence portion
uaguuggggcauuuggaauu

SEQ ID NO: 2875 - RNA, 20 nt, Artificial Sequence
  C3-targeting RNA guide sequence portion
uauaaacuccaauuccacga

SEQ ID NO: 2876 - RNA, 20 nt, Artificial Sequence
  C3-targeting RNA guide sequence portion
uauaaacuccaauuccauga

SEQ ID NO: 2877 - RNA, 20 nt, Artificial Sequence
  C3-targeting RNA guide sequence portion
uauaaucauucccaaccugc

SEQ ID NO: 2878 - RNA, 20 nt, Artificial Sequence
  C3-targeting RNA guide sequence portion
uauacaugaacccgaaguag

SEQ ID NO: 2879 - RNA, 20 nt, Artificial Sequence
  C3-targeting RNA guide sequence portion
uauacauuugggcugccuga

SEQ ID NO: 2880 - RNA, 20 nt, Artificial Sequence
  C3-targeting RNA guide sequence portion
uauacauuugggcugccugu

SEQ ID NO: 2881 - RNA, 20 nt, Artificial Sequence
  C3-targeting RNA guide sequence portion
uauaguuggggcauuuggaa

SEQ ID NO: 2882 - RNA, 20 nt, Artificial Sequence
  C3-targeting RNA guide sequence portion
uauauaaacuccaauuccac

SEQ ID NO: 2883 - RNA, 20 nt, Artificial Sequence
  C3-targeting RNA guide sequence portion
uauauaaacuccaauuccau

SEQ ID NO: 2884 - RNA, 20 nt, Artificial Sequence
  C3-targeting RNA guide sequence portion
uauauaaucauucccaaccu

SEQ ID NO: 2885 - RNA, 20 nt, Artificial Sequence
  C3-targeting RNA guide sequence portion
uauauacauuugggcugccu

SEQ ID NO: 2886 - RNA, 20 nt, Artificial Sequence
  C3-targeting RNA guide sequence portion
uauauauaaucauucccaac

SEQ ID NO: 2887 - RNA, 20 nt, Artificial Sequence
  C3-targeting RNA guide sequence portion
uauauauauuugggcugccu

SEQ ID NO: 2888 - RNA, 20 nt, Artificial Sequence
  C3-targeting RNA guide sequence portion
uauauauuugggcugccugu

SEQ ID NO: 2889 - RNA, 20 nt, Artificial Sequence
  C3-targeting RNA guide sequence portion
uauauuugggcugccuguga

SEQ ID NO: 2890 - RNA, 20 nt, Artificial Sequence
  C3-targeting RNA guide sequence portion
uaucguggaauuggaguuua

SEQ ID NO: 2891 - RNA, 20 nt, Artificial Sequence
  C3-targeting RNA guide sequence portion
uaucuucucugggcacugcc

SEQ ID NO: 2892 - RNA, 20 nt, Artificial Sequence
  C3-targeting RNA guide sequence portion
uaugacucuacccacaaaca

SEQ ID NO: 2893 - RNA, 20 nt, Artificial Sequence
  C3-targeting RNA guide sequence portion
uauggguuggguguuugugg

SEQ ID NO: 2894 - RNA, 20 nt, Artificial Sequence
  C3-targeting RNA guide sequence portion
uaugguggaauuggaguuug

SEQ ID NO: 2895 - RNA, 20 nt, Artificial Sequence
  C3-targeting RNA guide sequence portion
uauguaaacacucaaacucc

SEQ ID NO: 2896 - RNA, 20 nt, Artificial Sequence
  C3-targeting RNA guide sequence portion
uauguggguuuggguaggua

SEQ ID NO: 2897 - RNA, 20 nt, Artificial Sequence
  C3-targeting RNA guide sequence portion
uaugugguguucauugaugg

SEQ ID NO: 2898 - RNA, 20 nt, Artificial Sequence
  C3-targeting RNA guide sequence portion
uauuaggacugggguguugg

SEQ ID NO: 2899 - RNA, 20 nt, Artificial Sequence
  C3-targeting RNA guide sequence portion
uauuuauuaggacuggggug

SEQ ID NO: 2900 - RNA, 20 nt, Artificial Sequence
  C3-targeting RNA guide sequence portion
uauuuggaguguuuagagag

SEQ ID NO: 2901 - RNA, 20 nt, Artificial Sequence
  C3-targeting RNA guide sequence portion
uauuugggcugccugugagu

SEQ ID NO: 2902 - RNA, 20 nt, Artificial Sequence
  C3-targeting RNA guide sequence portion
ucaaacucccggacacccuc

SEQ ID NO: 2903 - RNA, 20 nt, Artificial Sequence
  C3-targeting RNA guide sequence portion
ucaaaggccaggcccagcug

SEQ ID NO: 2904 - RNA, 20 nt, Artificial Sequence
  C3-targeting RNA guide sequence portion
ucaaaucuuagagcacccca

SEQ ID NO: 2905 - RNA, 20 nt, Artificial Sequence
  C3-targeting RNA guide sequence portion
ucaaccacaugggcaggaca

SEQ ID NO: 2906 - RNA, 20 nt, Artificial Sequence
  C3-targeting RNA guide sequence portion
ucaacucuaccuacccaaac

SEQ ID NO: 2907 - RNA, 20 nt, Artificial Sequence
  C3-targeting RNA guide sequence portion
ucaaugaacaccacauacac

SEQ ID NO: 2908 - RNA, 20 nt, Artificial Sequence
  C3-targeting RNA guide sequence portion
ucaauuccaaaugccccaac

SEQ ID NO: 2909 - RNA, 20 nt, Artificial Sequence
  C3-targeting RNA guide sequence portion
ucaauucuagaaacauccca

SEQ ID NO: 2910 - RNA, 20 nt, Artificial Sequence
  C3-targeting RNA guide sequence portion
ucacaggcagcccaaauaua

SEQ ID NO: 2911 - RNA, 20 nt, Artificial Sequence
  C3-targeting RNA guide sequence portion
ucacaggcagcccaaaugua

SEQ ID NO: 2912 - RNA, 20 nt, Artificial Sequence
  C3-targeting RNA guide sequence portion
ucacauccguggaaugacaa

SEQ ID NO: 2913 - RNA, 20 nt, Artificial Sequence
  C3-targeting RNA guide sequence portion
ucacuggagucagcgccugg

SEQ ID NO: 2914 - RNA, 20 nt, Artificial Sequence
  C3-targeting RNA guide sequence portion
ucacuggauccucuccagga

SEQ ID NO: 2915 - RNA, 20 nt, Artificial Sequence
  C3-targeting RNA guide sequence portion
ucagcaacuccuccaagucu

SEQ ID NO: 2916 - RNA, 20 nt, Artificial Sequence
  C3-targeting RNA guide sequence portion
ucagccagcugggccuggcc

SEQ ID NO: 2917 - RNA, 20 nt, Artificial Sequence
  C3-targeting RNA guide sequence portion
ucagcgccuggcaggcugug

SEQ ID NO: 2918 - RNA, 20 nt, Artificial Sequence
  C3-targeting RNA guide sequence portion
ucaggcagcccaaauguaua

SEQ ID NO: 2919 - RNA, 20 nt, Artificial Sequence
  C3-targeting RNA guide sequence portion
ucagggguuagcagguuggg

SEQ ID NO: 2920 - RNA, 20 nt, Artificial Sequence
  C3-targeting RNA guide sequence portion
ucagggugcauuuggguguu

SEQ ID NO: 2921 - RNA, 20 nt, Artificial Sequence
  C3-targeting RNA guide sequence portion
ucaggguuuggugggaugug

SEQ ID NO: 2922 - RNA, 20 nt, Artificial Sequence
  C3-targeting RNA guide sequence portion
ucaguguggguuuaaagauu

SEQ ID NO: 2923 - RNA, 20 nt, Artificial Sequence
  C3-targeting RNA guide sequence portion
ucaucuguugguuuagggug

SEQ ID NO: 2924 - RNA, 20 nt, Artificial Sequence
  C3-targeting RNA guide sequence portion
ucaugguggcugcuguccug

SEQ ID NO: 2925 - RNA, 20 nt, Artificial Sequence
  C3-targeting RNA guide sequence portion
ucauguauaguuggggcauu

SEQ ID NO: 2926 - RNA, 20 nt, Artificial Sequence
  C3-targeting RNA guide sequence portion
ucauuccacggaugugagac

SEQ ID NO: 2927 - RNA, 20 nt, Artificial Sequence
  C3-targeting RNA guide sequence portion
ucauucccaaccugcuaacc

SEQ ID NO: 2928 - RNA, 20 nt, Artificial Sequence
  C3-targeting RNA guide sequence portion
uccaaauauguaaacacuca

SEQ ID NO: 2929 - RNA, 20 nt, Artificial Sequence
  C3-targeting RNA guide sequence portion
uccaaaugccccaacuauac

SEQ ID NO: 2930 - RNA, 20 nt, Artificial Sequence
  C3-targeting RNA guide sequence portion
uccaacaccccaguccuaau

SEQ ID NO: 2931 - RNA, 20 nt, Artificial Sequence
  C3-targeting RNA guide sequence portion
uccaaccagcgucagcaacu

SEQ ID NO: 2932 - RNA, 20 nt, Artificial Sequence
  C3-targeting RNA guide sequence portion
uccaagucucuggacuucca

SEQ ID NO: 2933 - RNA, 20 nt, Artificial Sequence
  C3-targeting RNA guide sequence portion
uccaauuccaccauaccugg

SEQ ID NO: 2934 - RNA, 20 nt, Artificial Sequence
  C3-targeting RNA guide sequence portion
uccaauuccacgauaccugg

SEQ ID NO: 2935 - RNA, 20 nt, Artificial Sequence
  C3-targeting RNA guide sequence portion
uccaauuccaugauaccugg

SEQ ID NO: 2936 - RNA, 20 nt, Artificial Sequence
  C3-targeting RNA guide sequence portion
uccacaaacacccaaaugca

SEQ ID NO: 2937 - RNA, 20 nt, Artificial Sequence
  C3-targeting RNA guide sequence portion
uccacaaacacccaacccau

SEQ ID NO: 2938 - RNA, 20 nt, Artificial Sequence
  C3-targeting RNA guide sequence portion
uccaccauaccuggauucca

SEQ ID NO: 2939 - RNA, 20 nt, Artificial Sequence
  C3-targeting RNA guide sequence portion
uccaccccagaaccagcccu

SEQ ID NO: 2940 - RNA, 20 nt, Artificial Sequence
  C3-targeting RNA guide sequence portion
uccacgauaccuggauucca

SEQ ID NO: 2941 - RNA, 20 nt, Artificial Sequence
  C3-targeting RNA guide sequence portion
uccacggaugugagacgcca

SEQ ID NO: 2942 - RNA, 20 nt, Artificial Sequence
  C3-targeting RNA guide sequence portion
uccagacccacaaucgccua

SEQ ID NO: 2943 - RNA, 20 nt, Artificial Sequence
  C3-targeting RNA guide sequence portion
uccagagacuuggaggaguu

SEQ ID NO: 2944 - RNA, 20 nt, Artificial Sequence
  C3-targeting RNA guide sequence portion
uccaggaccagaggcugggg

SEQ ID NO: 2945 - RNA, 20 nt, Artificial Sequence
  C3-targeting RNA guide sequence portion
uccagguaucauggaauugg

SEQ ID NO: 2946 - RNA, 20 nt, Artificial Sequence
  C3-targeting RNA guide sequence portion
uccagguaucguggaauugg

SEQ ID NO: 2947 - RNA, 20 nt, Artificial Sequence
  C3-targeting RNA guide sequence portion
uccagguaugguggaauugg

SEQ ID NO: 2948 - RNA, 20 nt, Artificial Sequence
  C3-targeting RNA guide sequence portion
uccaggucccuguagaauuc

SEQ ID NO: 2949 - RNA, 20 nt, Artificial Sequence
  C3-targeting RNA guide sequence portion
uccagugacugccggcgcac

SEQ ID NO: 2950 - RNA, 20 nt, Artificial Sequence
  C3-targeting RNA guide sequence portion
uccagugaggacuggcgucu

SEQ ID NO: 2951 - RNA, 20 nt, Artificial Sequence
  C3-targeting RNA guide sequence portion
uccaugauaccuggauucca

SEQ ID NO: 2952 - RNA, 20 nt, Artificial Sequence
  C3-targeting RNA guide sequence portion
ucccaaacuccaauuccacc

SEQ ID NO: 2953 - RNA, 20 nt, Artificial Sequence
  C3-targeting RNA guide sequence portion
ucccaaaucuuguaaagucc

SEQ ID NO: 2954 - RNA, 20 nt, Artificial Sequence
  C3-targeting RNA guide sequence portion
ucccaaccugcuaaccccug

SEQ ID NO: 2955 - RNA, 20 nt, Artificial Sequence
  C3-targeting RNA guide sequence portion
ucccaccaaacccugaaccu

SEQ ID NO: 2956 - RNA, 20 nt, Artificial Sequence
  C3-targeting RNA guide sequence portion
ucccacucucagccagcugg

SEQ ID NO: 2957 - RNA, 20 nt, Artificial Sequence
  C3-targeting RNA guide sequence portion
uccccaagcugcaaacuccc

SEQ ID NO: 2958 - RNA, 20 nt, Artificial Sequence
  C3-targeting RNA guide sequence portion
ucccggacacccucaacucu

SEQ ID NO: 2959 - RNA, 20 nt, Artificial Sequence
  C3-targeting RNA guide sequence portion
ucccuguagaauucagggug

SEQ ID NO: 2960 - RNA, 20 nt, Artificial Sequence
  C3-targeting RNA guide sequence portion
uccgggaguuugaguguuua

SEQ ID NO: 2961 - RNA, 20 nt, Artificial Sequence
  C3-targeting RNA guide sequence portion
uccguggaaugacaagccca

SEQ ID NO: 2962 - RNA, 20 nt, Artificial Sequence
  C3-targeting RNA guide sequence portion
uccucacuggagucagcgcc

SEQ ID NO: 2963 - RNA, 20 nt, Artificial Sequence
  C3-targeting RNA guide sequence portion
uccuccaagucucuggacuu

SEQ ID NO: 2964 - RNA, 20 nt, Artificial Sequence
  C3-targeting RNA guide sequence portion
uccucuccaggaccagaggc

SEQ ID NO: 2965 - RNA, 20 nt, Artificial Sequence
  C3-targeting RNA guide sequence portion
uccugcccaugugguugaga

SEQ ID NO: 2966 - RNA, 20 nt, Artificial Sequence
  C3-targeting RNA guide sequence portion
uccuggagaggauccaguga

SEQ ID NO: 2967 - RNA, 20 nt, Artificial Sequence
  C3-targeting RNA guide sequence portion
ucgccuaaacccacacaugc

SEQ ID NO: 2968 - RNA, 20 nt, Artificial Sequence
  C3-targeting RNA guide sequence portion
ucggagguuuggacuuuaca

SEQ ID NO: 2969 - RNA, 20 nt, Artificial Sequence
  C3-targeting RNA guide sequence portion
ucggaguggggcacgggagu

SEQ ID NO: 2970 - RNA, 20 nt, Artificial Sequence
  C3-targeting RNA guide sequence portion
ucggguucauguauaguugg

SEQ ID NO: 2971 - RNA, 20 nt, Artificial Sequence
  C3-targeting RNA guide sequence portion
ucguggaauuggaguuuaua

SEQ ID NO: 2972 - RNA, 20 nt, Artificial Sequence
  C3-targeting RNA guide sequence portion
ucguugcccaggcuuucaaa

SEQ ID NO: 2973 - RNA, 20 nt, Artificial Sequence
  C3-targeting RNA guide sequence portion
ucuaaacacuccaaauaugu

SEQ ID NO: 2974 - RNA, 20 nt, Artificial Sequence
  C3-targeting RNA guide sequence portion
ucuaaaccucaaaucuuaga

SEQ ID NO: 2975 - RNA, 20 nt, Artificial Sequence
  C3-targeting RNA guide sequence portion
ucuaagauuugagguuuaga

SEQ ID NO: 2976 - RNA, 20 nt, Artificial Sequence
  C3-targeting RNA guide sequence portion
ucuacagggaccuggacccc

SEQ ID NO: 2977 - RNA, 20 nt, Artificial Sequence
  C3-targeting RNA guide sequence portion
ucuacccacaaacagggcug

SEQ ID NO: 2978 - RNA, 20 nt, Artificial Sequence
  C3-targeting RNA guide sequence portion
ucuaccuacccaaacccaca

SEQ ID NO: 2979 - RNA, 20 nt, Artificial Sequence
  C3-targeting RNA guide sequence portion
ucuaccucucuaaacacucc

SEQ ID NO: 2980 - RNA, 20 nt, Artificial Sequence
  C3-targeting RNA guide sequence portion
ucuagaaacaucccaaacuc

SEQ ID NO: 2981 - RNA, 20 nt, Artificial Sequence
  C3-targeting RNA guide sequence portion
ucuagaauugaggucaucug

SEQ ID NO: 2982 - RNA, 20 nt, Artificial Sequence
  C3-targeting RNA guide sequence portion
ucucaaccacaugggcagga

SEQ ID NO: 2983 - RNA, 20 nt, Artificial Sequence
  C3-targeting RNA guide sequence portion
ucucacauccguggaaugac

SEQ ID NO: 2984 - RNA, 20 nt, Artificial Sequence
  C3-targeting RNA guide sequence portion
ucucagccagcugggccugg

SEQ ID NO: 2985 - RNA, 20 nt, Artificial Sequence
  C3-targeting RNA guide sequence portion
ucucaggcagcccaaaugua

SEQ ID NO: 2986 - RNA, 20 nt, Artificial Sequence
  C3-targeting RNA guide sequence portion
ucuccaggaccagaggcugg

SEQ ID NO: 2987 - RNA, 20 nt, Artificial Sequence
  C3-targeting RNA guide sequence portion
ucucuaaacacuccaaauau

SEQ ID NO: 2988 - RNA, 20 nt, Artificial Sequence
  C3-targeting RNA guide sequence portion
ucucuggacuuccagaccca

SEQ ID NO: 2989 - RNA, 20 nt, Artificial Sequence
  C3-targeting RNA guide sequence portion
ucucugggcacugccaccgu

SEQ ID NO: 2990 - RNA, 20 nt, Artificial Sequence
  C3-targeting RNA guide sequence portion
ucugcuuccaccccagaacc

SEQ ID NO: 2991 - RNA, 20 nt, Artificial Sequence
  C3-targeting RNA guide sequence portion
ucuggaaguccagagacuug

SEQ ID NO: 2992 - RNA, 20 nt, Artificial Sequence
  C3-targeting RNA guide sequence portion
ucuggacuuccagacccaca

SEQ ID NO: 2993 - RNA, 20 nt, Artificial Sequence
  C3-targeting RNA guide sequence portion
ucugggcacugccaccgucu

SEQ ID NO: 2994 - RNA, 20 nt, Artificial Sequence
  C3-targeting RNA guide sequence portion
ucugggguggaagcagacau

SEQ ID NO: 2995 - RNA, 20 nt, Artificial Sequence
  C3-targeting RNA guide sequence portion
ucugguccuggagaggaucc

SEQ ID NO: 2996 - RNA, 20 nt, Artificial Sequence
  C3-targeting RNA guide sequence portion
ucuguugguuuaggguguau

SEQ ID NO: 2997 - RNA, 20 nt, Artificial Sequence
  C3-targeting RNA guide sequence portion
ucuuagagcaccccaaaccc

SEQ ID NO: 2998 - RNA, 20 nt, Artificial Sequence
  C3-targeting RNA guide sequence portion
ucuucucugggcacugccac

SEQ ID NO: 2999 - RNA, 20 nt, Artificial Sequence
  C3-targeting RNA guide sequence portion
ucuuguaaaguccaaaccuc

SEQ ID NO: 3000 - RNA, 20 nt, Artificial Sequence
  C3-targeting RNA guide sequence portion
ucuuuaaacccacacugaaa

SEQ ID NO: 3001 - RNA, 20 nt, Artificial Sequence
  C3-targeting RNA guide sequence portion
ugaaaauugcaaguccccaa

SEQ ID NO: 3002 - RNA, 20 nt, Artificial Sequence
  C3-targeting RNA guide sequence portion
ugaaagccugggcaacgagg

SEQ ID NO: 3003 - RNA, 20 nt, Artificial Sequence
  C3-targeting RNA guide sequence portion
ugaacaccacauacacccua

SEQ ID NO: 3004 - RNA, 20 nt, Artificial Sequence
  C3-targeting RNA guide sequence portion
ugaacccgaaguagccaauc

SEQ ID NO: 3005 - RNA, 20 nt, Artificial Sequence
  C3-targeting RNA guide sequence portion
ugaaccuuccaaccagcguc

SEQ ID NO: 3006 - RNA, 20 nt, Artificial Sequence
  C3-targeting RNA guide sequence portion
ugaauccacaaacacccaaa

SEQ ID NO: 3007 - RNA, 20 nt, Artificial Sequence
  C3-targeting RNA guide sequence portion
ugaauucuacagggaccugg

SEQ ID NO: 3008 - RNA, 20 nt, Artificial Sequence
  C3-targeting RNA guide sequence portion
ugacaagcccacucccgugc

SEQ ID NO: 3009 - RNA, 20 nt, Artificial Sequence
  C3-targeting RNA guide sequence portion
ugaccucaauucuagaaaca

SEQ ID NO: 3010 - RNA, 20 nt, Artificial Sequence
  C3-targeting RNA guide sequence portion
ugacgcugguuggaagguuc

SEQ ID NO: 3011 - RNA, 20 nt, Artificial Sequence
  C3-targeting RNA guide sequence portion
ugacuccagugaggacuggc

SEQ ID NO: 3012 - RNA, 20 nt, Artificial Sequence
  C3-targeting RNA guide sequence portion
ugacucccacucucagccag

SEQ ID NO: 3013 - RNA, 20 nt, Artificial Sequence
  C3-targeting RNA guide sequence portion
ugacucuacccacaaacagg

SEQ ID NO: 3014 - RNA, 20 nt, Artificial Sequence
  C3-targeting RNA guide sequence portion
ugacugccggcgcacuugcc

SEQ ID NO: 3015 - RNA, 20 nt, Artificial Sequence
  C3-targeting RNA guide sequence portion
ugagacgccaguccucacug

SEQ ID NO: 3016 - RNA, 20 nt, Artificial Sequence
  C3-targeting RNA guide sequence portion
ugagacgguggcagugccca

SEQ ID NO: 3017 - RNA, 20 nt, Artificial Sequence
  C3-targeting RNA guide sequence portion
ugagagugggagucauggug

SEQ ID NO: 3018 - RNA, 20 nt, Artificial Sequence
  C3-targeting RNA guide sequence portion
ugagaguuuggguguuuaug

SEQ ID NO: 3019 - RNA, 20 nt, Artificial Sequence
  C3-targeting RNA guide sequence portion
ugaggacuggcgucucacau

SEQ ID NO: 3020 - RNA, 20 nt, Artificial Sequence
  C3-targeting RNA guide sequence portion
ugaggguguccgggaguuug

SEQ ID NO: 3021 - RNA, 20 nt, Artificial Sequence
  C3-targeting RNA guide sequence portion
ugaggucaucuguugguuua

SEQ ID NO: 3022 - RNA, 20 nt, Artificial Sequence
  C3-targeting RNA guide sequence portion
ugagguuuagagguuuuggc

SEQ ID NO: 3023 - RNA, 20 nt, Artificial Sequence
  C3-targeting RNA guide sequence portion
ugagugguuaugacucuacc

SEQ ID NO: 3024 - RNA, 20 nt, Artificial Sequence
  C3-targeting RNA guide sequence portion
ugaguguuuacauauuugga

SEQ ID NO: 3025 - RNA, 20 nt, Artificial Sequence
  C3-targeting RNA guide sequence portion
ugauaccuggauuccacaaa

SEQ ID NO: 3026 - RNA, 20 nt, Artificial Sequence
  C3-targeting RNA guide sequence portion
ugauuauauauauuugggcu

SEQ ID NO: 3027 - RNA, 20 nt, Artificial Sequence
  C3-targeting RNA guide sequence portion
ugauuguauuuauuaggacu

SEQ ID NO: 3028 - RNA, 20 nt, Artificial Sequence
  C3-targeting RNA guide sequence portion
ugcaaacucccaaaucuugu

SEQ ID NO: 3029 - RNA, 20 nt, Artificial Sequence
  C3-targeting RNA guide sequence portion
ugcaaguccccaagcugcaa

SEQ ID NO: 3030 - RNA, 20 nt, Artificial Sequence
  C3-targeting RNA guide sequence portion
ugcaauuuucaguguggguu

SEQ ID NO: 3031 - RNA, 20 nt, Artificial Sequence
  C3-targeting RNA guide sequence portion
ugcacccugaauucuacagg

SEQ ID NO: 3032 - RNA, 20 nt, Artificial Sequence
  C3-targeting RNA guide sequence portion
ugcagcuuggggacuugcaa

SEQ ID NO: 3033 - RNA, 20 nt, Artificial Sequence
  C3-targeting RNA guide sequence portion
ugcauuuggguguuugugga

SEQ ID NO: 3034 - RNA, 20 nt, Artificial Sequence
  C3-targeting RNA guide sequence portion
ugccaaugccauuaucuucu

SEQ ID NO: 3035 - RNA, 20 nt, Artificial Sequence
  C3-targeting RNA guide sequence portion
ugccaccgucucaaccacau

SEQ ID NO: 3036 - RNA, 20 nt, Artificial Sequence
  C3-targeting RNA guide sequence portion
ugccaggcgcugacuccagu

SEQ ID NO: 3037 - RNA, 20 nt, Artificial Sequence
  C3-targeting RNA guide sequence portion
ugccauuaucuucucugggc

SEQ ID NO: 3038 - RNA, 20 nt, Artificial Sequence
  C3-targeting RNA guide sequence portion
ugcccagagaagauaauggc

SEQ ID NO: 3039 - RNA, 20 nt, Artificial Sequence
  C3-targeting RNA guide sequence portion
ugcccaggcuuucaaaggcc

SEQ ID NO: 3040 - RNA, 20 nt, Artificial Sequence
  C3-targeting RNA guide sequence portion
ugcccaugugguugagacgg

SEQ ID NO: 3041 - RNA, 20 nt, Artificial Sequence
  C3-targeting RNA guide sequence portion
ugccccaaacccuaaaccuc

SEQ ID NO: 3042 - RNA, 20 nt, Artificial Sequence
  C3-targeting RNA guide sequence portion
ugccccaacuauacaugaac

SEQ ID NO: 3043 - RNA, 20 nt, Artificial Sequence
  C3-targeting RNA guide sequence portion
ugccccagccucugguccug

SEQ ID NO: 3044 - RNA, 20 nt, Artificial Sequence
  C3-targeting RNA guide sequence portion
ugccggcgcacuugccaaug

SEQ ID NO: 3045 - RNA, 20 nt, Artificial Sequence
  C3-targeting RNA guide sequence portion
ugccugagaguuuggguguu

SEQ ID NO: 3046 - RNA, 20 nt, Artificial Sequence
  C3-targeting RNA guide sequence portion
ugcgccggcagucacuggau

SEQ ID NO: 3047 - RNA, 20 nt, Artificial Sequence
  C3-targeting RNA guide sequence portion
ugcuaaccccugaauccaca

SEQ ID NO: 3048 - RNA, 20 nt, Artificial Sequence
  C3-targeting RNA guide sequence portion
ugcucuaagauuugagguuu

SEQ ID NO: 3049 - RNA, 20 nt, Artificial Sequence
  C3-targeting RNA guide sequence portion
ugcugacgcugguuggaagg

SEQ ID NO: 3050 - RNA, 20 nt, Artificial Sequence
  C3-targeting RNA guide sequence portion
ugcuguccugcccauguggu

SEQ ID NO: 3051 - RNA, 20 nt, Artificial Sequence
  C3-targeting RNA guide sequence portion
ugcuuccaccccagaaccag

SEQ ID NO: 3052 - RNA, 20 nt, Artificial Sequence
  C3-targeting RNA guide sequence portion
uggaagcagacauuuggggg

SEQ ID NO: 3053 - RNA, 20 nt, Artificial Sequence
  C3-targeting RNA guide sequence portion
uggaagguucaggguuuggu

SEQ ID NO: 3054 - RNA, 20 nt, Artificial Sequence
  C3-targeting RNA guide sequence portion
uggaaguccagagacuugga

SEQ ID NO: 3055 - RNA, 20 nt, Artificial Sequence
  C3-targeting RNA guide sequence portion
uggaauccagguaucaugga

SEQ ID NO: 3056 - RNA, 20 nt, Artificial Sequence
  C3-targeting RNA guide sequence portion
uggaauccagguaucgugga

SEQ ID NO: 3057 - RNA, 20 nt, Artificial Sequence
  C3-targeting RNA guide sequence portion
uggaauccagguauggugga

SEQ ID NO: 3058 - RNA, 20 nt, Artificial Sequence
  C3-targeting RNA guide sequence portion
uggaaugacaagcccacucc

SEQ ID NO: 3059 - RNA, 20 nt, Artificial Sequence
  C3-targeting RNA guide sequence portion
uggaauuggaguuugggaug

SEQ ID NO: 3060 - RNA, 20 nt, Artificial Sequence
  C3-targeting RNA guide sequence portion
uggacccccaaaugucugcu

SEQ ID NO: 3061 - RNA, 20 nt, Artificial Sequence
  C3-targeting RNA guide sequence portion
uggacuuccagacccacaau

SEQ ID NO: 3062 - RNA, 20 nt, Artificial Sequence
  C3-targeting RNA guide sequence portion
uggacuuuacaagauuuggg

SEQ ID NO: 3063 - RNA, 20 nt, Artificial Sequence
  C3-targeting RNA guide sequence portion
uggagacucggagguuugga

SEQ ID NO: 3064 - RNA, 20 nt, Artificial Sequence
  C3-targeting RNA guide sequence portion
uggagaggauccagugacug

SEQ ID NO: 3065 - RNA, 20 nt, Artificial Sequence
  C3-targeting RNA guide sequence portion
uggaggaguugcugacgcug

SEQ ID NO: 3066 - RNA, 20 nt, Artificial Sequence
  C3-targeting RNA guide sequence portion
uggagguuuaggcuggguuu

SEQ ID NO: 3067 - RNA, 20 nt, Artificial Sequence
  C3-targeting RNA guide sequence portion
uggagucagcgccuggcagg

SEQ ID NO: 3068 - RNA, 20 nt, Artificial Sequence
  C3-targeting RNA guide sequence portion
uggaguguuuagagagguag

SEQ ID NO: 3069 - RNA, 20 nt, Artificial Sequence
  C3-targeting RNA guide sequence portion
uggaguuugggauguuucua

SEQ ID NO: 3070 - RNA, 20 nt, Artificial Sequence
  C3-targeting RNA guide sequence portion
uggauccucuccaggaccag

SEQ ID NO: 3071 - RNA, 20 nt, Artificial Sequence
  C3-targeting RNA guide sequence portion
uggauucagggguuagcagg

SEQ ID NO: 3072 - RNA, 20 nt, Artificial Sequence
  C3-targeting RNA guide sequence portion
uggauuccacaaacacccaa

SEQ ID NO: 3073 - RNA, 20 nt, Artificial Sequence
  C3-targeting RNA guide sequence portion
uggcaagugcgccggcaguc

SEQ ID NO: 3074 - RNA, 20 nt, Artificial Sequence
  C3-targeting RNA guide sequence portion
uggcaggcugugugccccag

SEQ ID NO: 3075 - RNA, 20 nt, Artificial Sequence
  C3-targeting RNA guide sequence portion
uggcagugcccagagaagau

SEQ ID NO: 3076 - RNA, 20 nt, Artificial Sequence
  C3-targeting RNA guide sequence portion
uggcauuggcaagugcgccg

SEQ ID NO: 3077 - RNA, 20 nt, Artificial Sequence
  C3-targeting RNA guide sequence portion
uggcccccucguugcccagg

SEQ ID NO: 3078 - RNA, 20 nt, Artificial Sequence
  C3-targeting RNA guide sequence portion
uggccuuugaaagccugggc

SEQ ID NO: 3079 - RNA, 20 nt, Artificial Sequence
  C3-targeting RNA guide sequence portion
uggcguauguggguuugggu

SEQ ID NO: 3080 - RNA, 20 nt, Artificial Sequence
  C3-targeting RNA guide sequence portion
uggcgucucacauccgugga

SEQ ID NO: 3081 - RNA, 20 nt, Artificial Sequence
  C3-targeting RNA guide sequence portion
uggcuacuucggguucaugu

SEQ ID NO: 3082 - RNA, 20 nt, Artificial Sequence
  C3-targeting RNA guide sequence portion
uggcugagagugggagucau

SEQ ID NO: 3083 - RNA, 20 nt, Artificial Sequence
  C3-targeting RNA guide sequence portion
uggcugcuguccugcccaug

SEQ ID NO: 3084 - RNA, 20 nt, Artificial Sequence
  C3-targeting RNA guide sequence portion
ugggaaugauuauauauauu

SEQ ID NO: 3085 - RNA, 20 nt, Artificial Sequence
  C3-targeting RNA guide sequence portion
ugggagucaugguggcugcu

SEQ ID NO: 3086 - RNA, 20 nt, Artificial Sequence
  C3-targeting RNA guide sequence portion
ugggaguuugcagcuugggg

SEQ ID NO: 3087 - RNA, 20 nt, Artificial Sequence
  C3-targeting RNA guide sequence portion
ugggauguguggcccccucg

SEQ ID NO: 3088 - RNA, 20 nt, Artificial Sequence
  C3-targeting RNA guide sequence portion
ugggauguuucuagaauuga

SEQ ID NO: 3089 - RNA, 20 nt, Artificial Sequence
  C3-targeting RNA guide sequence portion
ugggcaacgagggggccaca

SEQ ID NO: 3090 - RNA, 20 nt, Artificial Sequence
  C3-targeting RNA guide sequence portion
ugggcacugccaccgucuca

SEQ ID NO: 3091 - RNA, 20 nt, Artificial Sequence
  C3-targeting RNA guide sequence portion
ugggcaggacagcagccacc

SEQ ID NO: 3092 - RNA, 20 nt, Artificial Sequence
  C3-targeting RNA guide sequence portion
ugggccuggccuuugaaagc

SEQ ID NO: 3093 - RNA, 20 nt, Artificial Sequence
  C3-targeting RNA guide sequence portion
ugggcugccugagaguuugg

SEQ ID NO: 3094 - RNA, 20 nt, Artificial Sequence
  C3-targeting RNA guide sequence portion
ugggcuugucauuccacgga

SEQ ID NO: 3095 - RNA, 20 nt, Artificial Sequence
  C3-targeting RNA guide sequence portion
uggggacuugcaauuuucag

SEQ ID NO: 3096 - RNA, 20 nt, Artificial Sequence
  C3-targeting RNA guide sequence portion
uggggcacacagccugccag

SEQ ID NO: 3097 - RNA, 20 nt, Artificial Sequence
  C3-targeting RNA guide sequence portion
uggggcacgggagugggcuu

SEQ ID NO: 3098 - RNA, 20 nt, Artificial Sequence
  C3-targeting RNA guide sequence portion
uggggcauguguggguuuag

SEQ ID NO: 3099 - RNA, 20 nt, Artificial Sequence
  C3-targeting RNA guide sequence portion
uggggcauuuggaauugauu

SEQ ID NO: 3100 - RNA, 20 nt, Artificial Sequence
  C3-targeting RNA guide sequence portion
uggggguccaggucccugua

SEQ ID NO: 3101 - RNA, 20 nt, Artificial Sequence
  C3-targeting RNA guide sequence portion
uggggugcucuaagauuuga

SEQ ID NO: 3102 - RNA, 20 nt, Artificial Sequence
  C3-targeting RNA guide sequence portion
ugggguggaagcagacauuu

SEQ ID NO: 3103 - RNA, 20 nt, Artificial Sequence
  C3-targeting RNA guide sequence portion
ugggguguuggagguuuagg

SEQ ID NO: 3104 - RNA, 20 nt, Artificial Sequence
  C3-targeting RNA guide sequence portion
uggguagguagaguugaggg

SEQ ID NO: 3105 - RNA, 20 nt, Artificial Sequence
  C3-targeting RNA guide sequence portion
ugggucuggaaguccagaga

SEQ ID NO: 3106 - RNA, 20 nt, Artificial Sequence
  C3-targeting RNA guide sequence portion
uggguguuuauggguugggu

SEQ ID NO: 3107 - RNA, 20 nt, Artificial Sequence
  C3-targeting RNA guide sequence portion
uggguguuuguggaauccag

SEQ ID NO: 3108 - RNA, 20 nt, Artificial Sequence
  C3-targeting RNA guide sequence portion
uggguguuuguggauucagg

SEQ ID NO: 3109 - RNA, 20 nt, Artificial Sequence
  C3-targeting RNA guide sequence portion
uggguuggguguuuguggaa

SEQ ID NO: 3110 - RNA, 20 nt, Artificial Sequence
  C3-targeting RNA guide sequence portion
uggguuuaaagauuggcuac

SEQ ID NO: 3111 - RNA, 20 nt, Artificial Sequence
  C3-targeting RNA guide sequence portion
uggguuuaggcgauuguggg

SEQ ID NO: 3112 - RNA, 20 nt, Artificial Sequence
  C3-targeting RNA guide sequence portion
uggguuuggggugcucuaag

SEQ ID NO: 3113 - RNA, 20 nt, Artificial Sequence
  C3-targeting RNA guide sequence portion
uggguuuggguagguagagu

SEQ ID NO: 3114 - RNA, 20 nt, Artificial Sequence
  C3-targeting RNA guide sequence portion
ugguccuggagaggauccag

SEQ ID NO: 3115 - RNA, 20 nt, Artificial Sequence
  C3-targeting RNA guide sequence portion
ugguggaauuggaguuuggg

SEQ ID NO: 3116 - RNA, 20 nt, Artificial Sequence
  C3-targeting RNA guide sequence portion
ugguggcugcuguccugccc

SEQ ID NO: 3117 - RNA, 20 nt, Artificial Sequence
  C3-targeting RNA guide sequence portion
uggugggauguguggccccc

SEQ ID NO: 3118 - RNA, 20 nt, Artificial Sequence
  C3-targeting RNA guide sequence portion
ugguguucauugauggugcg

SEQ ID NO: 3119 - RNA, 20 nt, Artificial Sequence
  C3-targeting RNA guide sequence portion
ugguuaugacucuacccaca

SEQ ID NO: 3120 - RNA, 20 nt, Artificial Sequence
  C3-targeting RNA guide sequence portion
ugguucugggguggaagcag

SEQ ID NO: 3121 - RNA, 20 nt, Artificial Sequence
  C3-targeting RNA guide sequence portion
ugguugagacgguggcagug

SEQ ID NO: 3122 - RNA, 20 nt, Artificial Sequence
  C3-targeting RNA guide sequence portion
ugguuggaagguucaggguu

SEQ ID NO: 3123 - RNA, 20 nt, Artificial Sequence
  C3-targeting RNA guide sequence portion
ugguuuaggguguauguggu

SEQ ID NO: 3124 - RNA, 20 nt, Artificial Sequence
  C3-targeting RNA guide sequence portion
uguaaacacucaaacucccg

SEQ ID NO: 3125 - RNA, 20 nt, Artificial Sequence
  C3-targeting RNA guide sequence portion
uguaaaguccaaaccuccga

SEQ ID NO: 3126 - RNA, 20 nt, Artificial Sequence
  C3-targeting RNA guide sequence portion
uguagaauucagggugcauu

SEQ ID NO: 3127 - RNA, 20 nt, Artificial Sequence
  C3-targeting RNA guide sequence portion
uguauaguuggggcauuugg

SEQ ID NO: 3128 - RNA, 20 nt, Artificial Sequence
  C3-targeting RNA guide sequence portion
uguauauaaacuccaauucc

SEQ ID NO: 3129 - RNA, 20 nt, Artificial Sequence
  C3-targeting RNA guide sequence portion
uguaugugguguucauugau

SEQ ID NO: 3130 - RNA, 20 nt, Artificial Sequence
  C3-targeting RNA guide sequence portion
uguauuuauuaggacugggg

SEQ ID NO: 3131 - RNA, 20 nt, Artificial Sequence
  C3-targeting RNA guide sequence portion
ugucauuccacggaugugag

SEQ ID NO: 3132 - RNA, 20 nt, Artificial Sequence
  C3-targeting RNA guide sequence portion
uguccgggaguuugaguguu

SEQ ID NO: 3133 - RNA, 20 nt, Artificial Sequence
  C3-targeting RNA guide sequence portion
uguccugcccaugugguuga

SEQ ID NO: 3134 - RNA, 20 nt, Artificial Sequence
  C3-targeting RNA guide sequence portion
ugucggaguggggcacggga

SEQ ID NO: 3135 - RNA, 20 nt, Artificial Sequence
  C3-targeting RNA guide sequence portion
ugucugcuuccaccccagaa

SEQ ID NO: 3136 - RNA, 20 nt, Artificial Sequence
  C3-targeting RNA guide sequence portion
ugugagacgccaguccucac

SEQ ID NO: 3137 - RNA, 20 nt, Artificial Sequence
  C3-targeting RNA guide sequence portion
ugugccccagccucuggucc

SEQ ID NO: 3138 - RNA, 20 nt, Artificial Sequence
  C3-targeting RNA guide sequence portion
uguggaauccagguaucaug

SEQ ID NO: 3139 - RNA, 20 nt, Artificial Sequence
  C3-targeting RNA guide sequence portion
uguggaauccagguaucgug

SEQ ID NO: 3140 - RNA, 20 nt, Artificial Sequence
  C3-targeting RNA guide sequence portion
uguggaauccagguauggug

SEQ ID NO: 3141 - RNA, 20 nt, Artificial Sequence
  C3-targeting RNA guide sequence portion
uguggauucagggguuagca

SEQ ID NO: 3142 - RNA, 20 nt, Artificial Sequence
  C3-targeting RNA guide sequence portion
uguggcccccucguugccca

SEQ ID NO: 3143 - RNA, 20 nt, Artificial Sequence
  C3-targeting RNA guide sequence portion
ugugggucuggaaguccaga

SEQ ID NO: 3144 - RNA, 20 nt, Artificial Sequence
  C3-targeting RNA guide sequence portion
uguggguuuaaagauuggcu

SEQ ID NO: 3145 - RNA, 20 nt, Artificial Sequence
  C3-targeting RNA guide sequence portion
uguggguuuaggcgauugug

SEQ ID NO: 3146 - RNA, 20 nt, Artificial Sequence
  C3-targeting RNA guide sequence portion
uguggguuuggguagguaga

SEQ ID NO: 3147 - RNA, 20 nt, Artificial Sequence
  C3-targeting RNA guide sequence portion
ugugguguucauugauggug

SEQ ID NO: 3148 - RNA, 20 nt, Artificial Sequence
  C3-targeting RNA guide sequence portion
ugugguugagacgguggcag

SEQ ID NO: 3149 - RNA, 20 nt, Artificial Sequence
  C3-targeting RNA guide sequence portion
ugugugccccagccucuggu

SEQ ID NO: 3150 - RNA, 20 nt, Artificial Sequence
  C3-targeting RNA guide sequence portion
uguguggcccccucguugcc

SEQ ID NO: 3151 - RNA, 20 nt, Artificial Sequence
  C3-targeting RNA guide sequence portion
uguguggguuuaggcgauug

SEQ ID NO: 3152 - RNA, 20 nt, Artificial Sequence
  C3-targeting RNA guide sequence portion
uguuggagguuuaggcuggg

SEQ ID NO: 3153 - RNA, 20 nt, Artificial Sequence
  C3-targeting RNA guide sequence portion
uguugguuuaggguguaugu

SEQ ID NO: 3154 - RNA, 20 nt, Artificial Sequence
  C3-targeting RNA guide sequence portion
uguuuacauauuuggagugu

SEQ ID NO: 3155 - RNA, 20 nt, Artificial Sequence
  C3-targeting RNA guide sequence portion
uguuuagagagguagagguu

SEQ ID NO: 3156 - RNA, 20 nt, Artificial Sequence
  C3-targeting RNA guide sequence portion
uguuuauggguuggguguuu

SEQ ID NO: 3157 - RNA, 20 nt, Artificial Sequence
  C3-targeting RNA guide sequence portion
uguuucuagaauugagguca

SEQ ID NO: 3158 - RNA, 20 nt, Artificial Sequence
  C3-targeting RNA guide sequence portion
uguuuguggaauccagguau

SEQ ID NO: 3159 - RNA, 20 nt, Artificial Sequence
  C3-targeting RNA guide sequence portion
uguuuguggauucagggguu

SEQ ID NO: 3160 - RNA, 20 nt, Artificial Sequence
  C3-targeting RNA guide sequence portion
uguuuguggguagagucaua

SEQ ID NO: 3161 - RNA, 20 nt, Artificial Sequence
  C3-targeting RNA guide sequence portion
uuaaacccacacugaaaauu

SEQ ID NO: 3162 - RNA, 20 nt, Artificial Sequence
  C3-targeting RNA guide sequence portion
uuaaagauuggcuacuucgg

SEQ ID NO: 3163 - RNA, 20 nt, Artificial Sequence
  C3-targeting RNA guide sequence portion
uuacaagauuugggaguuug

SEQ ID NO: 3164 - RNA, 20 nt, Artificial Sequence
  C3-targeting RNA guide sequence portion
uuacauauuuggaguguuua

SEQ ID NO: 3165 - RNA, 20 nt, Artificial Sequence
  C3-targeting RNA guide sequence portion
uuagagagguagagguuuag

SEQ ID NO: 3166 - RNA, 20 nt, Artificial Sequence
  C3-targeting RNA guide sequence portion
uuagagcaccccaaacccag

SEQ ID NO: 3167 - RNA, 20 nt, Artificial Sequence
  C3-targeting RNA guide sequence portion
uuagagguuuuggcguaugu

SEQ ID NO: 3168 - RNA, 20 nt, Artificial Sequence
  C3-targeting RNA guide sequence portion
uuagcagguugggaaugauu

SEQ ID NO: 3169 - RNA, 20 nt, Artificial Sequence
  C3-targeting RNA guide sequence portion
uuaggacugggguguuggag

SEQ ID NO: 3170 - RNA, 20 nt, Artificial Sequence
  C3-targeting RNA guide sequence portion
uuaggcgauugugggucugg

SEQ ID NO: 3171 - RNA, 20 nt, Artificial Sequence
  C3-targeting RNA guide sequence portion
uuaggcuggguuuggggugc

SEQ ID NO: 3172 - RNA, 20 nt, Artificial Sequence
  C3-targeting RNA guide sequence portion
uuaggguguaugugguguuc

SEQ ID NO: 3173 - RNA, 20 nt, Artificial Sequence
  C3-targeting RNA guide sequence portion
uuaggguuuggggcaugugu

SEQ ID NO: 3174 - RNA, 20 nt, Artificial Sequence
  C3-targeting RNA guide sequence portion
uuauauacauuugggcugcc

SEQ ID NO: 3175 - RNA, 20 nt, Artificial Sequence
  C3-targeting RNA guide sequence portion
uuauauauauuugggcugcc

SEQ ID NO: 3176 - RNA, 20 nt, Artificial Sequence
  C3-targeting RNA guide sequence portion
uuaucuucucugggcacugc

SEQ ID NO: 3177 - RNA, 20 nt, Artificial Sequence
  C3-targeting RNA guide sequence portion
uuaugacucuacccacaaac

SEQ ID NO: 3178 - RNA, 20 nt, Artificial Sequence
  C3-targeting RNA guide sequence portion
uuauggguuggguguuugug

SEQ ID NO: 3179 - RNA, 20 nt, Artificial Sequence
  C3-targeting RNA guide sequence portion
uuauuaggacugggguguug

SEQ ID NO: 3180 - RNA, 20 nt, Artificial Sequence
  C3-targeting RNA guide sequence portion
uucaaaggccaggcccagcu

SEQ ID NO: 3181 - RNA, 20 nt, Artificial Sequence
  C3-targeting RNA guide sequence portion
uucagggguuagcagguugg

SEQ ID NO: 3182 - RNA, 20 nt, Artificial Sequence
  C3-targeting RNA guide sequence portion
uucagggugcauuugggugu

SEQ ID NO: 3183 - RNA, 20 nt, Artificial Sequence
  C3-targeting RNA guide sequence portion
uucaggguuuggugggaugu

SEQ ID NO: 3184 - RNA, 20 nt, Artificial Sequence
  C3-targeting RNA guide sequence portion
uucaguguggguuuaaagau

SEQ ID NO: 3185 - RNA, 20 nt, Artificial Sequence
  C3-targeting RNA guide sequence portion
uucauguauaguuggggcau

SEQ ID NO: 3186 - RNA, 20 nt, Artificial Sequence
  C3-targeting RNA guide sequence portion
uuccaaaugccccaacuaua

SEQ ID NO: 3187 - RNA, 20 nt, Artificial Sequence
  C3-targeting RNA guide sequence portion
uuccaaccagcgucagcaac

SEQ ID NO: 3188 - RNA, 20 nt, Artificial Sequence
  C3-targeting RNA guide sequence portion
uuccacaaacacccaaccca

SEQ ID NO: 3189 - RNA, 20 nt, Artificial Sequence
  C3-targeting RNA guide sequence portion
uuccaccauaccuggauucc

SEQ ID NO: 3190 - RNA, 20 nt, Artificial Sequence
  C3-targeting RNA guide sequence portion
uuccaccccagaaccagccc

SEQ ID NO: 3191 - RNA, 20 nt, Artificial Sequence
  C3-targeting RNA guide sequence portion
uuccacgauaccuggauucc

SEQ ID NO: 3192 - RNA, 20 nt, Artificial Sequence
  C3-targeting RNA guide sequence portion
uuccacggaugugagacgcc

SEQ ID NO: 3193 - RNA, 20 nt, Artificial Sequence
  C3-targeting RNA guide sequence portion
uuccagacccacaaucgccu

SEQ ID NO: 3194 - RNA, 20 nt, Artificial Sequence
  C3-targeting RNA guide sequence portion
uuccaugauaccuggauucc

SEQ ID NO: 3195 - RNA, 20 nt, Artificial Sequence
  C3-targeting RNA guide sequence portion
uucccaaccugcuaaccccu

SEQ ID NO: 3196 - RNA, 20 nt, Artificial Sequence
  C3-targeting RNA guide sequence portion
uucggguucauguauaguug

SEQ ID NO: 3197 - RNA, 20 nt, Artificial Sequence
  C3-targeting RNA guide sequence portion
uucuacagggaccuggaccc

SEQ ID NO: 3198 - RNA, 20 nt, Artificial Sequence
  C3-targeting RNA guide sequence portion
uucuagaaacaucccaaacu

SEQ ID NO: 3199 - RNA, 20 nt, Artificial Sequence
  C3-targeting RNA guide sequence portion
uucuagaauugaggucaucu

SEQ ID NO: 3200 - RNA, 20 nt, Artificial Sequence
  C3-targeting RNA guide sequence portion
uucucugggcacugccaccg

SEQ ID NO: 3201 - RNA, 20 nt, Artificial Sequence
  C3-targeting RNA guide sequence portion
uucugggguggaagcagaca

SEQ ID NO: 3202 - RNA, 20 nt, Artificial Sequence
  C3-targeting RNA guide sequence portion
uugaaagccugggcaacgag

SEQ ID NO: 3203 - RNA, 20 nt, Artificial Sequence
  C3-targeting RNA guide sequence portion
uugagacgguggcagugccc

SEQ ID NO: 3204 - RNA, 20 nt, Artificial Sequence
  C3-targeting RNA guide sequence portion
uugaggguguccgggaguuu

SEQ ID NO: 3205 - RNA, 20 nt, Artificial Sequence
  C3-targeting RNA guide sequence portion
uugaggucaucuguugguuu

SEQ ID NO: 3206 - RNA, 20 nt, Artificial Sequence
  C3-targeting RNA guide sequence portion
uugagguuuagagguuuugg

SEQ ID NO: 3207 - RNA, 20 nt, Artificial Sequence
  C3-targeting RNA guide sequence portion
uugaguguuuacauauuugg

SEQ ID NO: 3208 - RNA, 20 nt, Artificial Sequence
  C3-targeting RNA guide sequence portion
uugauuguauuuauuaggac

SEQ ID NO: 3209 - RNA, 20 nt, Artificial Sequence
  C3-targeting RNA guide sequence portion
uugcaaguccccaagcugca

SEQ ID NO: 3210 - RNA, 20 nt, Artificial Sequence
  C3-targeting RNA guide sequence portion
uugcaauuuucagugugggu

SEQ ID NO: 3211 - RNA, 20 nt, Artificial Sequence
  C3-targeting RNA guide sequence portion
uugcagcuuggggacuugca

SEQ ID NO: 3212 - RNA, 20 nt, Artificial Sequence
  C3-targeting RNA guide sequence portion
uugccaaugccauuaucuuc

SEQ ID NO: 3213 - RNA, 20 nt, Artificial Sequence
  C3-targeting RNA guide sequence portion
uugcccaggcuuucaaaggc

SEQ ID NO: 3214 - RNA, 20 nt, Artificial Sequence
  C3-targeting RNA guide sequence portion
uugcugacgcugguuggaag

SEQ ID NO: 3215 - RNA, 20 nt, Artificial Sequence
  C3-targeting RNA guide sequence portion
uuggaagguucaggguuugg

SEQ ID NO: 3216 - RNA, 20 nt, Artificial Sequence
  C3-targeting RNA guide sequence portion
uuggacuuuacaagauuugg

SEQ ID NO: 3217 - RNA, 20 nt, Artificial Sequence
  C3-targeting RNA guide sequence portion
uuggagacucggagguuugg

SEQ ID NO: 3218 - RNA, 20 nt, Artificial Sequence
  C3-targeting RNA guide sequence portion
uuggaggaguugcugacgcu

SEQ ID NO: 3219 - RNA, 20 nt, Artificial Sequence
  C3-targeting RNA guide sequence portion
uuggagguuuaggcuggguu

SEQ ID NO: 3220 - RNA, 20 nt, Artificial Sequence
  C3-targeting RNA guide sequence portion
uuggaguguuuagagaggua

SEQ ID NO: 3221 - RNA, 20 nt, Artificial Sequence
  C3-targeting RNA guide sequence portion
uuggaguuugggauguuucu

SEQ ID NO: 3222 - RNA, 20 nt, Artificial Sequence
  C3-targeting RNA guide sequence portion
uuggcaagugcgccggcagu

SEQ ID NO: 3223 - RNA, 20 nt, Artificial Sequence
  C3-targeting RNA guide sequence portion
uuggcguauguggguuuggg

SEQ ID NO: 3224 - RNA, 20 nt, Artificial Sequence
  C3-targeting RNA guide sequence portion
uuggcuacuucggguucaug

SEQ ID NO: 3225 - RNA, 20 nt, Artificial Sequence
  C3-targeting RNA guide sequence portion
uugggaaugauuauauauau

SEQ ID NO: 3226 - RNA, 20 nt, Artificial Sequence
  C3-targeting RNA guide sequence portion
uugggaguuugcagcuuggg

SEQ ID NO: 3227 - RNA, 20 nt, Artificial Sequence
  C3-targeting RNA guide sequence portion
uugggauguuucuagaauug

SEQ ID NO: 3228 - RNA, 20 nt, Artificial Sequence
  C3-targeting RNA guide sequence portion
uugggcugccugagaguuug

SEQ ID NO: 3229 - RNA, 20 nt, Artificial Sequence
  C3-targeting RNA guide sequence portion
uuggggacuugcaauuuuca

SEQ ID NO: 3230 - RNA, 20 nt, Artificial Sequence
  C3-targeting RNA guide sequence portion
uuggggcauguguggguuua

SEQ ID NO: 3231 - RNA, 20 nt, Artificial Sequence
  C3-targeting RNA guide sequence portion
uuggggcauuuggaauugau

SEQ ID NO: 3232 - RNA, 20 nt, Artificial Sequence
  C3-targeting RNA guide sequence portion
uuggggguccaggucccugu

SEQ ID NO: 3233 - RNA, 20 nt, Artificial Sequence
  C3-targeting RNA guide sequence portion
uuggggugcucuaagauuug

SEQ ID NO: 3234 - RNA, 20 nt, Artificial Sequence
  C3-targeting RNA guide sequence portion
uuggguagguagaguugagg

SEQ ID NO: 3235 - RNA, 20 nt, Artificial Sequence
  C3-targeting RNA guide sequence portion
uuggguguuuauggguuggg

SEQ ID NO: 3236 - RNA, 20 nt, Artificial Sequence
  C3-targeting RNA guide sequence portion
uuggguguuuguggaaucca

SEQ ID NO: 3237 - RNA, 20 nt, Artificial Sequence
  C3-targeting RNA guide sequence portion
uuggguguuuguggauucag

SEQ ID NO: 3238 - RNA, 20 nt, Artificial Sequence
  C3-targeting RNA guide sequence portion
uuggugggauguguggcccc

SEQ ID NO: 3239 - RNA, 20 nt, Artificial Sequence
  C3-targeting RNA guide sequence portion
uugguuuaggguguaugugg

SEQ ID NO: 3240 - RNA, 20 nt, Artificial Sequence
  C3-targeting RNA guide sequence portion
uuguaaaguccaaaccuccg

SEQ ID NO: 3241 - RNA, 20 nt, Artificial Sequence
  C3-targeting RNA guide sequence portion
uuguauuuauuaggacuggg

SEQ ID NO: 3242 - RNA, 20 nt, Artificial Sequence
  C3-targeting RNA guide sequence portion
uugucauuccacggauguga

SEQ ID NO: 3243 - RNA, 20 nt, Artificial Sequence
  C3-targeting RNA guide sequence portion
uuguggaauccagguaucau

SEQ ID NO: 3244 - RNA, 20 nt, Artificial Sequence
  C3-targeting RNA guide sequence portion
uuguggaauccagguaucgu

SEQ ID NO: 3245 - RNA, 20 nt, Artificial Sequence
  C3-targeting RNA guide sequence portion
uuguggaauccagguauggu

SEQ ID NO: 3246 - RNA, 20 nt, Artificial Sequence
  C3-targeting RNA guide sequence portion
uuguggauucagggguuagc

SEQ ID NO: 3247 - RNA, 20 nt, Artificial Sequence
  C3-targeting RNA guide sequence portion
uuguggguagagucauaacc

SEQ ID NO: 3248 - RNA, 20 nt, Artificial Sequence
  C3-targeting RNA guide sequence portion
uugugggucuggaaguccag

SEQ ID NO: 3249 - RNA, 20 nt, Artificial Sequence
  C3-targeting RNA guide sequence portion
uuuaaacccacacugaaaau

SEQ ID NO: 3250 - RNA, 20 nt, Artificial Sequence
  C3-targeting RNA guide sequence portion
uuuaaagauuggcuacuucg

SEQ ID NO: 3251 - RNA, 20 nt, Artificial Sequence
  C3-targeting RNA guide sequence portion
uuuacaagauuugggaguuu

SEQ ID NO: 3252 - RNA, 20 nt, Artificial Sequence
  C3-targeting RNA guide sequence portion
uuuacauauuuggaguguuu

SEQ ID NO: 3253 - RNA, 20 nt, Artificial Sequence
  C3-targeting RNA guide sequence portion
uuuagagagguagagguuua

SEQ ID NO: 3254 - RNA, 20 nt, Artificial Sequence
  C3-targeting RNA guide sequence portion
uuuagagguuuuggcguaug

SEQ ID NO: 3255 - RNA, 20 nt, Artificial Sequence
  C3-targeting RNA guide sequence portion
uuuaggcgauugugggucug

SEQ ID NO: 3256 - RNA, 20 nt, Artificial Sequence
  C3-targeting RNA guide sequence portion
uuuaggcuggguuuggggug

SEQ ID NO: 3257 - RNA, 20 nt, Artificial Sequence
  C3-targeting RNA guide sequence portion
uuuaggguguaugugguguu

SEQ ID NO: 3258 - RNA, 20 nt, Artificial Sequence
  C3-targeting RNA guide sequence portion
uuuaggguuuggggcaugug

SEQ ID NO: 3259 - RNA, 20 nt, Artificial Sequence
  C3-targeting RNA guide sequence portion
uuuauauacauuugggcugc

SEQ ID NO: 3260 - RNA, 20 nt, Artificial Sequence
  C3-targeting RNA guide sequence portion
uuuauggguuggguguuugu

SEQ ID NO: 3261 - RNA, 20 nt, Artificial Sequence
  C3-targeting RNA guide sequence portion
uuuauuaggacugggguguu

SEQ ID NO: 3262 - RNA, 20 nt, Artificial Sequence
  C3-targeting RNA guide sequence portion
uuucaaaggccaggcccagc

SEQ ID NO: 3263 - RNA, 20 nt, Artificial Sequence
  C3-targeting RNA guide sequence portion
uuucaguguggguuuaaaga

SEQ ID NO: 3264 - RNA, 20 nt, Artificial Sequence
  C3-targeting RNA guide sequence portion
uuucuagaauugaggucauc

SEQ ID NO: 3265 - RNA, 20 nt, Artificial Sequence
  C3-targeting RNA guide sequence portion
uuugaaagccugggcaacga

SEQ ID NO: 3266 - RNA, 20 nt, Artificial Sequence
  C3-targeting RNA guide sequence portion
uuugagguuuagagguuuug

SEQ ID NO: 3267 - RNA, 20 nt, Artificial Sequence
  C3-targeting RNA guide sequence portion
uuugaguguuuacauauuug

SEQ ID NO: 3268 - RNA, 20 nt, Artificial Sequence
  C3-targeting RNA guide sequence portion
uuugcagcuuggggacuugc

SEQ ID NO: 3269 - RNA, 20 nt, Artificial Sequence
  C3-targeting RNA guide sequence portion
uuuggacuuuacaagauuug

SEQ ID NO: 3270 - RNA, 20 nt, Artificial Sequence
  C3-targeting RNA guide sequence portion
uuuggagacucggagguuug

SEQ ID NO: 3271 - RNA, 20 nt, Artificial Sequence
  C3-targeting RNA guide sequence portion
uuuggaguguuuagagaggu

SEQ ID NO: 3272 - RNA, 20 nt, Artificial Sequence
  C3-targeting RNA guide sequence portion
uuuggcguauguggguuugg

SEQ ID NO: 3273 - RNA, 20 nt, Artificial Sequence
  C3-targeting RNA guide sequence portion
uuugggaguuugcagcuugg

SEQ ID NO: 3274 - RNA, 20 nt, Artificial Sequence
  C3-targeting RNA guide sequence portion
uuugggauguuucuagaauu

SEQ ID NO: 3275 - RNA, 20 nt, Artificial Sequence
  C3-targeting RNA guide sequence portion
uuugggcugccugagaguuu

SEQ ID NO: 3276 - RNA, 20 nt, Artificial Sequence
  C3-targeting RNA guide sequence portion
uuuggggcauguguggguuu

SEQ ID NO: 3277 - RNA, 20 nt, Artificial Sequence
  C3-targeting RNA guide sequence portion
uuuggggguccaggucccug

SEQ ID NO: 3278 - RNA, 20 nt, Artificial Sequence
  C3-targeting RNA guide sequence portion
uuuggggugcucuaagauuu

SEQ ID NO: 3279 - RNA, 20 nt, Artificial Sequence
  C3-targeting RNA guide sequence portion
uuuggguagguagaguugag

SEQ ID NO: 3280 - RNA, 20 nt, Artificial Sequence
  C3-targeting RNA guide sequence portion
uuuggguguuuauggguugg

SEQ ID NO: 3281 - RNA, 20 nt, Artificial Sequence
  C3-targeting RNA guide sequence portion
uuuggguguuuguggauuca

SEQ ID NO: 3282 - RNA, 20 nt, Artificial Sequence
  C3-targeting RNA guide sequence portion
uuuggugggauguguggccc

SEQ ID NO: 3283 - RNA, 20 nt, Artificial Sequence
  C3-targeting RNA guide sequence portion
uuuguggaauccagguauca

SEQ ID NO: 3284 - RNA, 20 nt, Artificial Sequence
  C3-targeting RNA guide sequence portion
uuuguggaauccagguaucg

SEQ ID NO: 3285 - RNA, 20 nt, Artificial Sequence
  C3-targeting RNA guide sequence portion
uuuguggaauccagguaugg

SEQ ID NO: 3286 - RNA, 20 nt, Artificial Sequence
  C3-targeting RNA guide sequence portion
uuuguggauucagggguuag

SEQ ID NO: 3287 - RNA, 20 nt, Artificial Sequence
  C3-targeting RNA guide sequence portion
uuuguggguagagucauaac

SEQ ID NO: 3288 - RNA, 20 nt, Artificial Sequence
  C3-targeting RNA guide sequence portion
uuuucaguguggguuuaaag

SEQ ID NO: 3289 - RNA, 20 nt, Artificial Sequence
  C3-targeting RNA guide sequence portion
uuuuggcguauguggguuug

SEQ ID NO: 3290 - RNA, 21 nt, Artificial Sequence
  C3-targeting RNA guide sequence portion
aaaaccucuaaaccucaaauc

SEQ ID NO: 3291 - RNA, 21 nt, Artificial Sequence
  C3-targeting RNA guide sequence portion
aaaauugcaaguccccaagcu

SEQ ID NO: 3292 - RNA, 21 nt, Artificial Sequence
  C3-targeting RNA guide sequence portion
aaacacccaaacucucaggca

SEQ ID NO: 3293 - RNA, 21 nt, Artificial Sequence
  C3-targeting RNA guide sequence portion
aaacacccaaaugcacccuga

SEQ ID NO: 3294 - RNA, 21 nt, Artificial Sequence
  C3-targeting RNA guide sequence portion
aaacacccaacccauaaacac

SEQ ID NO: 3295 - RNA, 21 nt, Artificial Sequence
  C3-targeting RNA guide sequence portion
aaacacucaaacucccggaca

SEQ ID NO: 3296 - RNA, 21 nt, Artificial Sequence
  C3-targeting RNA guide sequence portion
aaacagggcugguucuggggu

SEQ ID NO: 3297 - RNA, 21 nt, Artificial Sequence
  C3-targeting RNA guide sequence portion
aaacaucccaaacuccaauuc

SEQ ID NO: 3298 - RNA, 21 nt, Artificial Sequence
  C3-targeting RNA guide sequence portion
aaaccaacagaugaccucaau

SEQ ID NO: 3299 - RNA, 21 nt, Artificial Sequence
  C3-targeting RNA guide sequence portion
aaacccacacaugccccaaac

SEQ ID NO: 3300 - RNA, 21 nt, Artificial Sequence
  C3-targeting RNA guide sequence portion
aaacccacacugaaaauugca

SEQ ID NO: 3301 - RNA, 21 nt, Artificial Sequence
  C3-targeting RNA guide sequence portion
aaacccacauacgccaaaacc

SEQ ID NO: 3302 - RNA, 21 nt, Artificial Sequence
  C3-targeting RNA guide sequence portion
aaacccagccuaaaccuccaa

SEQ ID NO: 3303 - RNA, 21 nt, Artificial Sequence
  C3-targeting RNA guide sequence portion
aaacccuaaaccucuaccucu

SEQ ID NO: 3304 - RNA, 21 nt, Artificial Sequence
  C3-targeting RNA guide sequence portion
aaacccugaaccuuccaacca

SEQ ID NO: 3305 - RNA, 21 nt, Artificial Sequence
  C3-targeting RNA guide sequence portion
aaaccucaaaucuuagagcac

SEQ ID NO: 3306 - RNA, 21 nt, Artificial Sequence
  C3-targeting RNA guide sequence portion
aaaccuccaacaccccagucc

SEQ ID NO: 3307 - RNA, 21 nt, Artificial Sequence
  C3-targeting RNA guide sequence portion
aaaccucuaaaccucaaaucu

SEQ ID NO: 3308 - RNA, 21 nt, Artificial Sequence
  C3-targeting RNA guide sequence portion
aaaccucuaccucucuaaaca

SEQ ID NO: 3309 - RNA, 21 nt, Artificial Sequence
  C3-targeting RNA guide sequence portion
aaacucacaggcagcccaaau

SEQ ID NO: 3310 - RNA, 21 nt, Artificial Sequence
  C3-targeting RNA guide sequence portion
aaacuccaauuccaccauacc

SEQ ID NO: 3311 - RNA, 21 nt, Artificial Sequence
  C3-targeting RNA guide sequence portion
aaacuccaauuccacgauacc

SEQ ID NO: 3312 - RNA, 21 nt, Artificial Sequence
  C3-targeting RNA guide sequence portion
aaacuccaauuccaugauacc

SEQ ID NO: 3313 - RNA, 21 nt, Artificial Sequence
  C3-targeting RNA guide sequence portion
aaacucccaaaucuuguaaag

SEQ ID NO: 3314 - RNA, 21 nt, Artificial Sequence
  C3-targeting RNA guide sequence portion
aaacucccggacacccucaac

SEQ ID NO: 3315 - RNA, 21 nt, Artificial Sequence
  C3-targeting RNA guide sequence portion
aaacucucaggcagcccaaau

SEQ ID NO: 3316 - RNA, 21 nt, Artificial Sequence
  C3-targeting RNA guide sequence portion
aaagauuggcuacuucggguu

SEQ ID NO: 3317 - RNA, 21 nt, Artificial Sequence
  C3-targeting RNA guide sequence portion
aaagccugggcaacgaggggg

SEQ ID NO: 3318 - RNA, 21 nt, Artificial Sequence
  C3-targeting RNA guide sequence portion
aaaggccaggcccagcuggcu

SEQ ID NO: 3319 - RNA, 21 nt, Artificial Sequence
  C3-targeting RNA guide sequence portion
aaauacaaucaauuccaaaug

SEQ ID NO: 3320 - RNA, 21 nt, Artificial Sequence
  C3-targeting RNA guide sequence portion
aaauauguaaacacucaaacu

SEQ ID NO: 3321 - RNA, 21 nt, Artificial Sequence
  C3-targeting RNA guide sequence portion
aaaucuuagagcaccccaaac

SEQ ID NO: 3322 - RNA, 21 nt, Artificial Sequence
  C3-targeting RNA guide sequence portion
aaaucuuguaaaguccaaacc

SEQ ID NO: 3323 - RNA, 21 nt, Artificial Sequence
  C3-targeting RNA guide sequence portion
aaaugcacccugaauucuaca

SEQ ID NO: 3324 - RNA, 21 nt, Artificial Sequence
  C3-targeting RNA guide sequence portion
aaaugccccaacuauacauga

SEQ ID NO: 3325 - RNA, 21 nt, Artificial Sequence
  C3-targeting RNA guide sequence portion
aaaugucugcuuccaccccag

SEQ ID NO: 3326 - RNA, 21 nt, Artificial Sequence
  C3-targeting RNA guide sequence portion
aaauugcaaguccccaagcug

SEQ ID NO: 3327 - RNA, 21 nt, Artificial Sequence
  C3-targeting RNA guide sequence portion
aacaccacauacacccuaaac

SEQ ID NO: 3328 - RNA, 21 nt, Artificial Sequence
  C3-targeting RNA guide sequence portion
aacacccaaacucucaggcag

SEQ ID NO: 3329 - RNA, 21 nt, Artificial Sequence
  C3-targeting RNA guide sequence portion
aacacccaaaugcacccugaa

SEQ ID NO: 3330 - RNA, 21 nt, Artificial Sequence
  C3-targeting RNA guide sequence portion
aacacccaacccauaaacacc

SEQ ID NO: 3331 - RNA, 21 nt, Artificial Sequence
  C3-targeting RNA guide sequence portion
aacaccccaguccuaauaaau

SEQ ID NO: 3332 - RNA, 21 nt, Artificial Sequence
  C3-targeting RNA guide sequence portion
aacacucaaacucccggacac

SEQ ID NO: 3333 - RNA, 21 nt, Artificial Sequence
  C3-targeting RNA guide sequence portion
aacagaugaccucaauucuag

SEQ ID NO: 3334 - RNA, 21 nt, Artificial Sequence
  C3-targeting RNA guide sequence portion
aacagggcugguucuggggug

SEQ ID NO: 3335 - RNA, 21 nt, Artificial Sequence
  C3-targeting RNA guide sequence portion
aacaucccaaacuccaauucc

SEQ ID NO: 3336 - RNA, 21 nt, Artificial Sequence
  C3-targeting RNA guide sequence portion
aaccaacagaugaccucaauu

SEQ ID NO: 3337 - RNA, 21 nt, Artificial Sequence
  C3-targeting RNA guide sequence portion
aaccacaugggcaggacagca

SEQ ID NO: 3338 - RNA, 21 nt, Artificial Sequence
  C3-targeting RNA guide sequence portion
aaccagcccuguuugugggua

SEQ ID NO: 3339 - RNA, 21 nt, Artificial Sequence
  C3-targeting RNA guide sequence portion
aaccagcgucagcaacuccuc

SEQ ID NO: 3340 - RNA, 21 nt, Artificial Sequence
  C3-targeting RNA guide sequence portion
aacccacacaugccccaaacc

SEQ ID NO: 3341 - RNA, 21 nt, Artificial Sequence
  C3-targeting RNA guide sequence portion
aacccacacugaaaauugcaa

SEQ ID NO: 3342 - RNA, 21 nt, Artificial Sequence
  C3-targeting RNA guide sequence portion
aacccacauacgccaaaaccu

SEQ ID NO: 3343 - RNA, 21 nt, Artificial Sequence
  C3-targeting RNA guide sequence portion
aacccagccuaaaccuccaac

SEQ ID NO: 3344 - RNA, 21 nt, Artificial Sequence
  C3-targeting RNA guide sequence portion
aacccauaaacacccaaacuc

SEQ ID NO: 3345 - RNA, 21 nt, Artificial Sequence
  C3-targeting RNA guide sequence portion
aaccccugaauccacaaacac

SEQ ID NO: 3346 - RNA, 21 nt, Artificial Sequence
  C3-targeting RNA guide sequence portion
aacccgaaguagccaaucuuu

SEQ ID NO: 3347 - RNA, 21 nt, Artificial Sequence
  C3-targeting RNA guide sequence portion
aacccuaaaccucuaccucuc

SEQ ID NO: 3348 - RNA, 21 nt, Artificial Sequence
  C3-targeting RNA guide sequence portion
aacccugaaccuuccaaccag

SEQ ID NO: 3349 - RNA, 21 nt, Artificial Sequence
  C3-targeting RNA guide sequence portion
aaccgcaccaucaaugaacac

SEQ ID NO: 3350 - RNA, 21 nt, Artificial Sequence
  C3-targeting RNA guide sequence portion
aaccucaaaucuuagagcacc

SEQ ID NO: 3351 - RNA, 21 nt, Artificial Sequence
  C3-targeting RNA guide sequence portion
aaccuccaacaccccaguccu

SEQ ID NO: 3352 - RNA, 21 nt, Artificial Sequence
  C3-targeting RNA guide sequence portion
aaccucuaaaccucaaaucuu

SEQ ID NO: 3353 - RNA, 21 nt, Artificial Sequence
  C3-targeting RNA guide sequence portion
aaccucuaccucucuaaacac

SEQ ID NO: 3354 - RNA, 21 nt, Artificial Sequence
  C3-targeting RNA guide sequence portion
aaccugcuaaccccugaaucc

SEQ ID NO: 3355 - RNA, 21 nt, Artificial Sequence
  C3-targeting RNA guide sequence portion
aaccuuccaaccagcgucagc

SEQ ID NO: 3356 - RNA, 21 nt, Artificial Sequence
  C3-targeting RNA guide sequence portion
aacgagggggccacacauccc

SEQ ID NO: 3357 - RNA, 21 nt, Artificial Sequence
  C3-targeting RNA guide sequence portion
aacuauacaugaacccgaagu

SEQ ID NO: 3358 - RNA, 21 nt, Artificial Sequence
  C3-targeting RNA guide sequence portion
aacucacaggcagcccaaaua

SEQ ID NO: 3359 - RNA, 21 nt, Artificial Sequence
  C3-targeting RNA guide sequence portion
aacucacaggcagcccaaaug

SEQ ID NO: 3360 - RNA, 21 nt, Artificial Sequence
  C3-targeting RNA guide sequence portion
aacuccaauuccaccauaccu

SEQ ID NO: 3361 - RNA, 21 nt, Artificial Sequence
  C3-targeting RNA guide sequence portion
aacuccaauuccacgauaccu

SEQ ID NO: 3362 - RNA, 21 nt, Artificial Sequence
  C3-targeting RNA guide sequence portion
aacuccaauuccaugauaccu

SEQ ID NO: 3363 - RNA, 21 nt, Artificial Sequence
  C3-targeting RNA guide sequence portion
aacucccaaaucuuguaaagu

SEQ ID NO: 3364 - RNA, 21 nt, Artificial Sequence
  C3-targeting RNA guide sequence portion
aacucccggacacccucaacu

SEQ ID NO: 3365 - RNA, 21 nt, Artificial Sequence
  C3-targeting RNA guide sequence portion
aacuccuccaagucucuggac

SEQ ID NO: 3366 - RNA, 21 nt, Artificial Sequence
  C3-targeting RNA guide sequence portion
aacucuaccuacccaaaccca

SEQ ID NO: 3367 - RNA, 21 nt, Artificial Sequence
  C3-targeting RNA guide sequence portion
aacucucaggcagcccaaaug

SEQ ID NO: 3368 - RNA, 21 nt, Artificial Sequence
  C3-targeting RNA guide sequence portion
aagauaauggcauuggcaagu

SEQ ID NO: 3369 - RNA, 21 nt, Artificial Sequence
  C3-targeting RNA guide sequence portion
aagauuggcuacuucggguuc

SEQ ID NO: 3370 - RNA, 21 nt, Artificial Sequence
  C3-targeting RNA guide sequence portion
aagauuugagguuuagagguu

SEQ ID NO: 3371 - RNA, 21 nt, Artificial Sequence
  C3-targeting RNA guide sequence portion
aagauuugggaguuugcagcu

SEQ ID NO: 3372 - RNA, 21 nt, Artificial Sequence
  C3-targeting RNA guide sequence portion
aagcagacauuugggggucca

SEQ ID NO: 3373 - RNA, 21 nt, Artificial Sequence
  C3-targeting RNA guide sequence portion
aagcccacucccgugccccac

SEQ ID NO: 3374 - RNA, 21 nt, Artificial Sequence
  C3-targeting RNA guide sequence portion
aagccugggcaacgagggggc

SEQ ID NO: 3375 - RNA, 21 nt, Artificial Sequence
  C3-targeting RNA guide sequence portion
aagcugcaaacucccaaaucu

SEQ ID NO: 3376 - RNA, 21 nt, Artificial Sequence
  C3-targeting RNA guide sequence portion
aaggccaggcccagcuggcug

SEQ ID NO: 3377 - RNA, 21 nt, Artificial Sequence
  C3-targeting RNA guide sequence portion
aagguucaggguuugguggga

SEQ ID NO: 3378 - RNA, 21 nt, Artificial Sequence
  C3-targeting RNA guide sequence portion
aaguagccaaucuuuaaaccc

SEQ ID NO: 3379 - RNA, 21 nt, Artificial Sequence
  C3-targeting RNA guide sequence portion
aaguccagagacuuggaggag

SEQ ID NO: 3380 - RNA, 21 nt, Artificial Sequence
  C3-targeting RNA guide sequence portion
aaguccccaagcugcaaacuc

SEQ ID NO: 3381 - RNA, 21 nt, Artificial Sequence
  C3-targeting RNA guide sequence portion
aagucucuggacuuccagacc

SEQ ID NO: 3382 - RNA, 21 nt, Artificial Sequence
  C3-targeting RNA guide sequence portion
aagugcgccggcagucacugg

SEQ ID NO: 3383 - RNA, 21 nt, Artificial Sequence
  C3-targeting RNA guide sequence portion
aauacaaucaauuccaaaugc

SEQ ID NO: 3384 - RNA, 21 nt, Artificial Sequence
  C3-targeting RNA guide sequence portion
aauauguaaacacucaaacuc

SEQ ID NO: 3385 - RNA, 21 nt, Artificial Sequence
  C3-targeting RNA guide sequence portion
aaucaauuccaaaugccccaa

SEQ ID NO: 3386 - RNA, 21 nt, Artificial Sequence
  C3-targeting RNA guide sequence portion
aaucauucccaaccugcuaac

SEQ ID NO: 3387 - RNA, 21 nt, Artificial Sequence
  C3-targeting RNA guide sequence portion
aauccacaaacacccaaaugc

SEQ ID NO: 3388 - RNA, 21 nt, Artificial Sequence
  C3-targeting RNA guide sequence portion
aauccagguaucauggaauug

SEQ ID NO: 3389 - RNA, 21 nt, Artificial Sequence
  C3-targeting RNA guide sequence portion
aauccagguaucguggaauug

SEQ ID NO: 3390 - RNA, 21 nt, Artificial Sequence
  C3-targeting RNA guide sequence portion
aauccagguaugguggaauug

SEQ ID NO: 3391 - RNA, 21 nt, Artificial Sequence
  C3-targeting RNA guide sequence portion
aaucgccuaaacccacacaug

SEQ ID NO: 3392 - RNA, 21 nt, Artificial Sequence
  C3-targeting RNA guide sequence portion
aaucuuagagcaccccaaacc

SEQ ID NO: 3393 - RNA, 21 nt, Artificial Sequence
  C3-targeting RNA guide sequence portion
aaucuuguaaaguccaaaccu

SEQ ID NO: 3394 - RNA, 21 nt, Artificial Sequence
  C3-targeting RNA guide sequence portion
aaucuuuaaacccacacugaa

SEQ ID NO: 3395 - RNA, 21 nt, Artificial Sequence
  C3-targeting RNA guide sequence portion
aaugaacaccacauacacccu

SEQ ID NO: 3396 - RNA, 21 nt, Artificial Sequence
  C3-targeting RNA guide sequence portion
aaugacaagcccacucccgug

SEQ ID NO: 3397 - RNA, 21 nt, Artificial Sequence
  C3-targeting RNA guide sequence portion
aaugauuauauauauuugggc

SEQ ID NO: 3398 - RNA, 21 nt, Artificial Sequence
  C3-targeting RNA guide sequence portion
aaugcacccugaauucuacag

SEQ ID NO: 3399 - RNA, 21 nt, Artificial Sequence
  C3-targeting RNA guide sequence portion
aaugccauuaucuucucuggg

SEQ ID NO: 3400 - RNA, 21 nt, Artificial Sequence
  C3-targeting RNA guide sequence portion
aaugccccaacuauacaugaa

SEQ ID NO: 3401 - RNA, 21 nt, Artificial Sequence
  C3-targeting RNA guide sequence portion
aauggcauuggcaagugcgcc

SEQ ID NO: 3402 - RNA, 21 nt, Artificial Sequence
  C3-targeting RNA guide sequence portion
aaugucugcuuccaccccaga

SEQ ID NO: 3403 - RNA, 21 nt, Artificial Sequence
  C3-targeting RNA guide sequence portion
aauucagggugcauuugggug

SEQ ID NO: 3404 - RNA, 21 nt, Artificial Sequence
  C3-targeting RNA guide sequence portion
aauuccaaaugccccaacuau

SEQ ID NO: 3405 - RNA, 21 nt, Artificial Sequence
  C3-targeting RNA guide sequence portion
aauuccaccauaccuggauuc

SEQ ID NO: 3406 - RNA, 21 nt, Artificial Sequence
  C3-targeting RNA guide sequence portion
aauuccacgauaccuggauuc

SEQ ID NO: 3407 - RNA, 21 nt, Artificial Sequence
  C3-targeting RNA guide sequence portion
aauuccaugauaccuggauuc

SEQ ID NO: 3408 - RNA, 21 nt, Artificial Sequence
  C3-targeting RNA guide sequence portion
aauucuacagggaccuggacc

SEQ ID NO: 3409 - RNA, 21 nt, Artificial Sequence
  C3-targeting RNA guide sequence portion
aauucuagaaacaucccaaac

SEQ ID NO: 3410 - RNA, 21 nt, Artificial Sequence
  C3-targeting RNA guide sequence portion
aauugaggucaucuguugguu

SEQ ID NO: 3411 - RNA, 21 nt, Artificial Sequence
  C3-targeting RNA guide sequence portion
aauugauuguauuuauuagga

SEQ ID NO: 3412 - RNA, 21 nt, Artificial Sequence
  C3-targeting RNA guide sequence portion
aauugcaaguccccaagcugc

SEQ ID NO: 3413 - RNA, 21 nt, Artificial Sequence
  C3-targeting RNA guide sequence portion
aauuggaguuugggauguuuc

SEQ ID NO: 3414 - RNA, 21 nt, Artificial Sequence
  C3-targeting RNA guide sequence portion
aauuuucaguguggguuuaaa

SEQ ID NO: 3415 - RNA, 21 nt, Artificial Sequence
  C3-targeting RNA guide sequence portion
acaaacacccaaaugcacccu

SEQ ID NO: 3416 - RNA, 21 nt, Artificial Sequence
  C3-targeting RNA guide sequence portion
acaaacacccaacccauaaac

SEQ ID NO: 3417 - RNA, 21 nt, Artificial Sequence
  C3-targeting RNA guide sequence portion
acaaacagggcugguucuggg

SEQ ID NO: 3418 - RNA, 21 nt, Artificial Sequence
  C3-targeting RNA guide sequence portion
acaagauuugggaguuugcag

SEQ ID NO: 3419 - RNA, 21 nt, Artificial Sequence
  C3-targeting RNA guide sequence portion
acaagcccacucccgugcccc

SEQ ID NO: 3420 - RNA, 21 nt, Artificial Sequence
  C3-targeting RNA guide sequence portion
acaaucaauuccaaaugcccc

SEQ ID NO: 3421 - RNA, 21 nt, Artificial Sequence
  C3-targeting RNA guide sequence portion
acaaucgccuaaacccacaca

SEQ ID NO: 3422 - RNA, 21 nt, Artificial Sequence
  C3-targeting RNA guide sequence portion
acacagccugccaggcgcuga

SEQ ID NO: 3423 - RNA, 21 nt, Artificial Sequence
  C3-targeting RNA guide sequence portion
acacaucccaccaaacccuga

SEQ ID NO: 3424 - RNA, 21 nt, Artificial Sequence
  C3-targeting RNA guide sequence portion
acacaugccccaaacccuaaa

SEQ ID NO: 3425 - RNA, 21 nt, Artificial Sequence
  C3-targeting RNA guide sequence portion
acaccacauacacccuaaacc

SEQ ID NO: 3426 - RNA, 21 nt, Artificial Sequence
  C3-targeting RNA guide sequence portion
acacccaaacucucaggcagc

SEQ ID NO: 3427 - RNA, 21 nt, Artificial Sequence
  C3-targeting RNA guide sequence portion
acacccaacccauaaacaccc

SEQ ID NO: 3428 - RNA, 21 nt, Artificial Sequence
  C3-targeting RNA guide sequence portion
acaccccaguccuaauaaaua

SEQ ID NO: 3429 - RNA, 21 nt, Artificial Sequence
  C3-targeting RNA guide sequence portion
acacccuaaaccaacagauga

SEQ ID NO: 3430 - RNA, 21 nt, Artificial Sequence
  C3-targeting RNA guide sequence portion
acacccucaacucuaccuacc

SEQ ID NO: 3431 - RNA, 21 nt, Artificial Sequence
  C3-targeting RNA guide sequence portion
acacucaaacucccggacacc

SEQ ID NO: 3432 - RNA, 21 nt, Artificial Sequence
  C3-targeting RNA guide sequence portion
acacuccaaauauguaaacac

SEQ ID NO: 3433 - RNA, 21 nt, Artificial Sequence
  C3-targeting RNA guide sequence portion
acacugaaaauugcaaguccc

SEQ ID NO: 3434 - RNA, 21 nt, Artificial Sequence
  C3-targeting RNA guide sequence portion
acagaugaccucaauucuaga

SEQ ID NO: 3435 - RNA, 21 nt, Artificial Sequence
  C3-targeting RNA guide sequence portion
acagcagccaccaugacuccc

SEQ ID NO: 3436 - RNA, 21 nt, Artificial Sequence
  C3-targeting RNA guide sequence portion
acagccugccaggcgcugacu

SEQ ID NO: 3437 - RNA, 21 nt, Artificial Sequence
  C3-targeting RNA guide sequence portion
acaggcagcccaaauauauau

SEQ ID NO: 3438 - RNA, 21 nt, Artificial Sequence
  C3-targeting RNA guide sequence portion
acaggcagcccaaauguauau

SEQ ID NO: 3439 - RNA, 21 nt, Artificial Sequence
  C3-targeting RNA guide sequence portion
acagggaccuggacccccaaa

SEQ ID NO: 3440 - RNA, 21 nt, Artificial Sequence
  C3-targeting RNA guide sequence portion
acagggcugguucuggggugg

SEQ ID NO: 3441 - RNA, 21 nt, Artificial Sequence
  C3-targeting RNA guide sequence portion
acauacacccuaaaccaacag

SEQ ID NO: 3442 - RNA, 21 nt, Artificial Sequence
  C3-targeting RNA guide sequence portion
acauacgccaaaaccucuaaa

SEQ ID NO: 3443 - RNA, 21 nt, Artificial Sequence
  C3-targeting RNA guide sequence portion
acauauuuggaguguuuagag

SEQ ID NO: 3444 - RNA, 21 nt, Artificial Sequence
  C3-targeting RNA guide sequence portion
acaucccaaacuccaauucca

SEQ ID NO: 3445 - RNA, 21 nt, Artificial Sequence
  C3-targeting RNA guide sequence portion
acaucccaccaaacccugaac

SEQ ID NO: 3446 - RNA, 21 nt, Artificial Sequence
  C3-targeting RNA guide sequence portion
acauccguggaaugacaagcc

SEQ ID NO: 3447 - RNA, 21 nt, Artificial Sequence
  C3-targeting RNA guide sequence portion
acaugaacccgaaguagccaa

SEQ ID NO: 3448 - RNA, 21 nt, Artificial Sequence
  C3-targeting RNA guide sequence portion
acaugccccaaacccuaaacc

SEQ ID NO: 3449 - RNA, 21 nt, Artificial Sequence
  C3-targeting RNA guide sequence portion
acaugggcaggacagcagcca

SEQ ID NO: 3450 - RNA, 21 nt, Artificial Sequence
  C3-targeting RNA guide sequence portion
acauuugggcugccugagagu

SEQ ID NO: 3451 - RNA, 21 nt, Artificial Sequence
  C3-targeting RNA guide sequence portion
acauuugggcugccugugagu

SEQ ID NO: 3452 - RNA, 21 nt, Artificial Sequence
  C3-targeting RNA guide sequence portion
acauuuggggguccagguccc

SEQ ID NO: 3453 - RNA, 21 nt, Artificial Sequence
  C3-targeting RNA guide sequence portion
accaaacccugaaccuuccaa

SEQ ID NO: 3454 - RNA, 21 nt, Artificial Sequence
  C3-targeting RNA guide sequence portion
accaacagaugaccucaauuc

SEQ ID NO: 3455 - RNA, 21 nt, Artificial Sequence
  C3-targeting RNA guide sequence portion
accacauacacccuaaaccaa

SEQ ID NO: 3456 - RNA, 21 nt, Artificial Sequence
  C3-targeting RNA guide sequence portion
accacaugggcaggacagcag

SEQ ID NO: 3457 - RNA, 21 nt, Artificial Sequence
  C3-targeting RNA guide sequence portion
accagaggcuggggcacacag

SEQ ID NO: 3458 - RNA, 21 nt, Artificial Sequence
  C3-targeting RNA guide sequence portion
accagcccuguuuguggguag

SEQ ID NO: 3459 - RNA, 21 nt, Artificial Sequence
  C3-targeting RNA guide sequence portion
accagcgucagcaacuccucc

SEQ ID NO: 3460 - RNA, 21 nt, Artificial Sequence
  C3-targeting RNA guide sequence portion
accauaccuggauuccacaaa

SEQ ID NO: 3461 - RNA, 21 nt, Artificial Sequence
  C3-targeting RNA guide sequence portion
accaucaaugaacaccacaua

SEQ ID NO: 3462 - RNA, 21 nt, Artificial Sequence
  C3-targeting RNA guide sequence portion
accaugacucccacucucagc

SEQ ID NO: 3463 - RNA, 21 nt, Artificial Sequence
  C3-targeting RNA guide sequence portion
acccaaacccacauacgccaa

SEQ ID NO: 3464 - RNA, 21 nt, Artificial Sequence
  C3-targeting RNA guide sequence portion
acccaaacucacaggcagccc

SEQ ID NO: 3465 - RNA, 21 nt, Artificial Sequence
  C3-targeting RNA guide sequence portion
acccaaacucucaggcagccc

SEQ ID NO: 3466 - RNA, 21 nt, Artificial Sequence
  C3-targeting RNA guide sequence portion
acccaaaugcacccugaauuc

SEQ ID NO: 3467 - RNA, 21 nt, Artificial Sequence
  C3-targeting RNA guide sequence portion
acccaacccauaaacacccaa

SEQ ID NO: 3468 - RNA, 21 nt, Artificial Sequence
  C3-targeting RNA guide sequence portion
acccacaaacagggcugguuc

SEQ ID NO: 3469 - RNA, 21 nt, Artificial Sequence
  C3-targeting RNA guide sequence portion
acccacaaucgccuaaaccca

SEQ ID NO: 3470 - RNA, 21 nt, Artificial Sequence
  C3-targeting RNA guide sequence portion
acccacacaugccccaaaccc

SEQ ID NO: 3471 - RNA, 21 nt, Artificial Sequence
  C3-targeting RNA guide sequence portion
acccacacugaaaauugcaag

SEQ ID NO: 3472 - RNA, 21 nt, Artificial Sequence
  C3-targeting RNA guide sequence portion
acccacauacgccaaaaccuc

SEQ ID NO: 3473 - RNA, 21 nt, Artificial Sequence
  C3-targeting RNA guide sequence portion
acccagccuaaaccuccaaca

SEQ ID NO: 3474 - RNA, 21 nt, Artificial Sequence
  C3-targeting RNA guide sequence portion
acccauaaacacccaaacucu

SEQ ID NO: 3475 - RNA, 21 nt, Artificial Sequence
  C3-targeting RNA guide sequence portion
accccaaacccagccuaaacc

SEQ ID NO: 3476 - RNA, 21 nt, Artificial Sequence
  C3-targeting RNA guide sequence portion
accccagaaccagcccuguuu

SEQ ID NO: 3477 - RNA, 21 nt, Artificial Sequence
  C3-targeting RNA guide sequence portion
accccaguccuaauaaauaca

SEQ ID NO: 3478 - RNA, 21 nt, Artificial Sequence
  C3-targeting RNA guide sequence portion
acccccaaaugucugcuucca

SEQ ID NO: 3479 - RNA, 21 nt, Artificial Sequence
  C3-targeting RNA guide sequence portion
acccccaaccgcaccaucaau

SEQ ID NO: 3480 - RNA, 21 nt, Artificial Sequence
  C3-targeting RNA guide sequence portion
accccugaauccacaaacacc

SEQ ID NO: 3481 - RNA, 21 nt, Artificial Sequence
  C3-targeting RNA guide sequence portion
acccgaaguagccaaucuuua

SEQ ID NO: 3482 - RNA, 21 nt, Artificial Sequence
  C3-targeting RNA guide sequence portion
acccuaaaccaacagaugacc

SEQ ID NO: 3483 - RNA, 21 nt, Artificial Sequence
  C3-targeting RNA guide sequence portion
acccuaaaccucuaccucucu

SEQ ID NO: 3484 - RNA, 21 nt, Artificial Sequence
  C3-targeting RNA guide sequence portion
acccucaacucuaccuaccca

SEQ ID NO: 3485 - RNA, 21 nt, Artificial Sequence
  C3-targeting RNA guide sequence portion
acccugaaccuuccaaccagc

SEQ ID NO: 3486 - RNA, 21 nt, Artificial Sequence
  C3-targeting RNA guide sequence portion
acccugaauucuacagggacc

SEQ ID NO: 3487 - RNA, 21 nt, Artificial Sequence
  C3-targeting RNA guide sequence portion
accgcaccaucaaugaacacc

SEQ ID NO: 3488 - RNA, 21 nt, Artificial Sequence
  C3-targeting RNA guide sequence portion
accgucucaaccacaugggca

SEQ ID NO: 3489 - RNA, 21 nt, Artificial Sequence
  C3-targeting RNA guide sequence portion
accuacccaaacccacauacg

SEQ ID NO: 3490 - RNA, 21 nt, Artificial Sequence
  C3-targeting RNA guide sequence portion
accucaaaucuuagagcaccc

SEQ ID NO: 3491 - RNA, 21 nt, Artificial Sequence
  C3-targeting RNA guide sequence portion
accucaauucuagaaacaucc

SEQ ID NO: 3492 - RNA, 21 nt, Artificial Sequence
  C3-targeting RNA guide sequence portion
accuccaacaccccaguccua

SEQ ID NO: 3493 - RNA, 21 nt, Artificial Sequence
  C3-targeting RNA guide sequence portion
accucuaaaccucaaaucuua

SEQ ID NO: 3494 - RNA, 21 nt, Artificial Sequence
  C3-targeting RNA guide sequence portion
accucuaccucucuaaacacu

SEQ ID NO: 3495 - RNA, 21 nt, Artificial Sequence
  C3-targeting RNA guide sequence portion
accucucuaaacacuccaaau

SEQ ID NO: 3496 - RNA, 21 nt, Artificial Sequence
  C3-targeting RNA guide sequence portion
accugcuaaccccugaaucca

SEQ ID NO: 3497 - RNA, 21 nt, Artificial Sequence
  C3-targeting RNA guide sequence portion
accuggacccccaaaugucug

SEQ ID NO: 3498 - RNA, 21 nt, Artificial Sequence
  C3-targeting RNA guide sequence portion
accuggauuccacaaacaccc

SEQ ID NO: 3499 - RNA, 21 nt, Artificial Sequence
  C3-targeting RNA guide sequence portion
accuuccaaccagcgucagca

SEQ ID NO: 3500 - RNA, 21 nt, Artificial Sequence
  C3-targeting RNA guide sequence portion
acgagggggccacacauccca

SEQ ID NO: 3501 - RNA, 21 nt, Artificial Sequence
  C3-targeting RNA guide sequence portion
acgauaccuggauuccacaaa

SEQ ID NO: 3502 - RNA, 21 nt, Artificial Sequence
  C3-targeting RNA guide sequence portion
acgccaaaaccucuaaaccuc

SEQ ID NO: 3503 - RNA, 21 nt, Artificial Sequence
  C3-targeting RNA guide sequence portion
acgccaguccucacuggaguc

SEQ ID NO: 3504 - RNA, 21 nt, Artificial Sequence
  C3-targeting RNA guide sequence portion
acgcugguuggaagguucagg

SEQ ID NO: 3505 - RNA, 21 nt, Artificial Sequence
  C3-targeting RNA guide sequence portion
acggaugugagacgccagucc

SEQ ID NO: 3506 - RNA, 21 nt, Artificial Sequence
  C3-targeting RNA guide sequence portion
acgggagugggcuugucauuc

SEQ ID NO: 3507 - RNA, 21 nt, Artificial Sequence
  C3-targeting RNA guide sequence portion
acgguggcagugcccagagaa

SEQ ID NO: 3508 - RNA, 21 nt, Artificial Sequence
  C3-targeting RNA guide sequence portion
acuauacaugaacccgaagua

SEQ ID NO: 3509 - RNA, 21 nt, Artificial Sequence
  C3-targeting RNA guide sequence portion
acucaaacucccggacacccu

SEQ ID NO: 3510 - RNA, 21 nt, Artificial Sequence
  C3-targeting RNA guide sequence portion
acucacaggcagcccaaauau

SEQ ID NO: 3511 - RNA, 21 nt, Artificial Sequence
  C3-targeting RNA guide sequence portion
acucacaggcagcccaaaugu

SEQ ID NO: 3512 - RNA, 21 nt, Artificial Sequence
  C3-targeting RNA guide sequence portion
acuccaaauauguaaacacuc

SEQ ID NO: 3513 - RNA, 21 nt, Artificial Sequence
  C3-targeting RNA guide sequence portion
acuccaauuccaccauaccug

SEQ ID NO: 3514 - RNA, 21 nt, Artificial Sequence
  C3-targeting RNA guide sequence portion
acuccaauuccacgauaccug

SEQ ID NO: 3515 - RNA, 21 nt, Artificial Sequence
  C3-targeting RNA guide sequence portion
acuccaauuccaugauaccug

SEQ ID NO: 3516 - RNA, 21 nt, Artificial Sequence
  C3-targeting RNA guide sequence portion
acuccagugaggacuggcguc

SEQ ID NO: 3517 - RNA, 21 nt, Artificial Sequence
  C3-targeting RNA guide sequence portion
acucccaaaucuuguaaaguc

SEQ ID NO: 3518 - RNA, 21 nt, Artificial Sequence
  C3-targeting RNA guide sequence portion
acucccacucucagccagcug

SEQ ID NO: 3519 - RNA, 21 nt, Artificial Sequence
  C3-targeting RNA guide sequence portion
acucccggacacccucaacuc

SEQ ID NO: 3520 - RNA, 21 nt, Artificial Sequence
  C3-targeting RNA guide sequence portion
acuccuccaagucucuggacu

SEQ ID NO: 3521 - RNA, 21 nt, Artificial Sequence
  C3-targeting RNA guide sequence portion
acucggagguuuggacuuuac

SEQ ID NO: 3522 - RNA, 21 nt, Artificial Sequence
  C3-targeting RNA guide sequence portion
acucuacccacaaacagggcu

SEQ ID NO: 3523 - RNA, 21 nt, Artificial Sequence
  C3-targeting RNA guide sequence portion
acucuaccuacccaaacccac

SEQ ID NO: 3524 - RNA, 21 nt, Artificial Sequence
  C3-targeting RNA guide sequence portion
acucucagccagcugggccug

SEQ ID NO: 3525 - RNA, 21 nt, Artificial Sequence
  C3-targeting RNA guide sequence portion
acucucaggcagcccaaaugu

SEQ ID NO: 3526 - RNA, 21 nt, Artificial Sequence
  C3-targeting RNA guide sequence portion
acugaaaauugcaagucccca

SEQ ID NO: 3527 - RNA, 21 nt, Artificial Sequence
  C3-targeting RNA guide sequence portion
acugccaccgucucaaccaca

SEQ ID NO: 3528 - RNA, 21 nt, Artificial Sequence
  C3-targeting RNA guide sequence portion
acugccggcgcacuugccaau

SEQ ID NO: 3529 - RNA, 21 nt, Artificial Sequence
  C3-targeting RNA guide sequence portion
acuggagucagcgccuggcag

SEQ ID NO: 3530 - RNA, 21 nt, Artificial Sequence
  C3-targeting RNA guide sequence portion
acuggauccucuccaggacca

SEQ ID NO: 3531 - RNA, 21 nt, Artificial Sequence
  C3-targeting RNA guide sequence portion
acuggcgucucacauccgugg

SEQ ID NO: 3532 - RNA, 21 nt, Artificial Sequence
  C3-targeting RNA guide sequence portion
acugggguguuggagguuuag

SEQ ID NO: 3533 - RNA, 21 nt, Artificial Sequence
  C3-targeting RNA guide sequence portion
acuuccagacccacaaucgcc

SEQ ID NO: 3534 - RNA, 21 nt, Artificial Sequence
  C3-targeting RNA guide sequence portion
acuucggguucauguauaguu

SEQ ID NO: 3535 - RNA, 21 nt, Artificial Sequence
  C3-targeting RNA guide sequence portion
acuugcaauuuucaguguggg

SEQ ID NO: 3536 - RNA, 21 nt, Artificial Sequence
  C3-targeting RNA guide sequence portion
acuugccaaugccauuaucuu

SEQ ID NO: 3537 - RNA, 21 nt, Artificial Sequence
  C3-targeting RNA guide sequence portion
acuuggaggaguugcugacgc

SEQ ID NO: 3538 - RNA, 21 nt, Artificial Sequence
  C3-targeting RNA guide sequence portion
acuuuacaagauuugggaguu

SEQ ID NO: 3539 - RNA, 21 nt, Artificial Sequence
  C3-targeting RNA guide sequence portion
agaaacaucccaaacuccaau

SEQ ID NO: 3540 - RNA, 21 nt, Artificial Sequence
  C3-targeting RNA guide sequence portion
agaaccagcccuguuuguggg

SEQ ID NO: 3541 - RNA, 21 nt, Artificial Sequence
  C3-targeting RNA guide sequence portion
agaagauaauggcauuggcaa

SEQ ID NO: 3542 - RNA, 21 nt, Artificial Sequence
  C3-targeting RNA guide sequence portion
agaauucagggugcauuuggg

SEQ ID NO: 3543 - RNA, 21 nt, Artificial Sequence
  C3-targeting RNA guide sequence portion
agaauugaggucaucuguugg

SEQ ID NO: 3544 - RNA, 21 nt, Artificial Sequence
  C3-targeting RNA guide sequence portion
agacauuuggggguccagguc

SEQ ID NO: 3545 - RNA, 21 nt, Artificial Sequence
  C3-targeting RNA guide sequence portion
agacccacaaucgccuaaacc

SEQ ID NO: 3546 - RNA, 21 nt, Artificial Sequence
  C3-targeting RNA guide sequence portion
agacgccaguccucacuggag

SEQ ID NO: 3547 - RNA, 21 nt, Artificial Sequence
  C3-targeting RNA guide sequence portion
agacgguggcagugcccagag

SEQ ID NO: 3548 - RNA, 21 nt, Artificial Sequence
  C3-targeting RNA guide sequence portion
agacucggagguuuggacuuu

SEQ ID NO: 3549 - RNA, 21 nt, Artificial Sequence
  C3-targeting RNA guide sequence portion
agacuuggaggaguugcugac

SEQ ID NO: 3550 - RNA, 21 nt, Artificial Sequence
  C3-targeting RNA guide sequence portion
agagaagauaauggcauuggc

SEQ ID NO: 3551 - RNA, 21 nt, Artificial Sequence
  C3-targeting RNA guide sequence portion
agagacuuggaggaguugcug

SEQ ID NO: 3552 - RNA, 21 nt, Artificial Sequence
  C3-targeting RNA guide sequence portion
agagagguagagguuuagggu

SEQ ID NO: 3553 - RNA, 21 nt, Artificial Sequence
  C3-targeting RNA guide sequence portion
agagcaccccaaacccagccu

SEQ ID NO: 3554 - RNA, 21 nt, Artificial Sequence
  C3-targeting RNA guide sequence portion
agaggauccagugacugccgg

SEQ ID NO: 3555 - RNA, 21 nt, Artificial Sequence
  C3-targeting RNA guide sequence portion
agaggcuggggcacacagccu

SEQ ID NO: 3556 - RNA, 21 nt, Artificial Sequence
  C3-targeting RNA guide sequence portion
agagguagagguuuaggguuu

SEQ ID NO: 3557 - RNA, 21 nt, Artificial Sequence
  C3-targeting RNA guide sequence portion
agagguuuaggguuuggggca

SEQ ID NO: 3558 - RNA, 21 nt, Artificial Sequence
  C3-targeting RNA guide sequence portion
agagguuuuggcguauguggg

SEQ ID NO: 3559 - RNA, 21 nt, Artificial Sequence
  C3-targeting RNA guide sequence portion
agagugggagucaugguggcu

SEQ ID NO: 3560 - RNA, 21 nt, Artificial Sequence
  C3-targeting RNA guide sequence portion
agaguugaggguguccgggag

SEQ ID NO: 3561 - RNA, 21 nt, Artificial Sequence
  C3-targeting RNA guide sequence portion
agaguuuggguguuuaugggu

SEQ ID NO: 3562 - RNA, 21 nt, Artificial Sequence
  C3-targeting RNA guide sequence portion
agauaauggcauuggcaagug

SEQ ID NO: 3563 - RNA, 21 nt, Artificial Sequence
  C3-targeting RNA guide sequence portion
agaugaccucaauucuagaaa

SEQ ID NO: 3564 - RNA, 21 nt, Artificial Sequence
  C3-targeting RNA guide sequence portion
agauuggcuacuucggguuca

SEQ ID NO: 3565 - RNA, 21 nt, Artificial Sequence
  C3-targeting RNA guide sequence portion
agauuugagguuuagagguuu

SEQ ID NO: 3566 - RNA, 21 nt, Artificial Sequence
  C3-targeting RNA guide sequence portion
agauuugggaguuugcagcuu

SEQ ID NO: 3567 - RNA, 21 nt, Artificial Sequence
  C3-targeting RNA guide sequence portion
agcaacuccuccaagucucug

SEQ ID NO: 3568 - RNA, 21 nt, Artificial Sequence
  C3-targeting RNA guide sequence portion
agcaccccaaacccagccuaa

SEQ ID NO: 3569 - RNA, 21 nt, Artificial Sequence
  C3-targeting RNA guide sequence portion
agcagacauuuggggguccag

SEQ ID NO: 3570 - RNA, 21 nt, Artificial Sequence
  C3-targeting RNA guide sequence portion
agcagccaccaugacucccac

SEQ ID NO: 3571 - RNA, 21 nt, Artificial Sequence
  C3-targeting RNA guide sequence portion
agccaaucuuuaaacccacac

SEQ ID NO: 3572 - RNA, 21 nt, Artificial Sequence
  C3-targeting RNA guide sequence portion
agccaccaugacucccacucu

SEQ ID NO: 3573 - RNA, 21 nt, Artificial Sequence
  C3-targeting RNA guide sequence portion
agccagcugggccuggccuuu

SEQ ID NO: 3574 - RNA, 21 nt, Artificial Sequence
  C3-targeting RNA guide sequence portion
agcccacucccgugccccacu

SEQ ID NO: 3575 - RNA, 21 nt, Artificial Sequence
  C3-targeting RNA guide sequence portion
agcccuguuuguggguagagu

SEQ ID NO: 3576 - RNA, 21 nt, Artificial Sequence
  C3-targeting RNA guide sequence portion
agccuaaaccuccaacacccc

SEQ ID NO: 3577 - RNA, 21 nt, Artificial Sequence
  C3-targeting RNA guide sequence portion
agccucugguccuggagagga

SEQ ID NO: 3578 - RNA, 21 nt, Artificial Sequence
  C3-targeting RNA guide sequence portion
agccugccaggcgcugacucc

SEQ ID NO: 3579 - RNA, 21 nt, Artificial Sequence
  C3-targeting RNA guide sequence portion
agccugggcaacgagggggcc

SEQ ID NO: 3580 - RNA, 21 nt, Artificial Sequence
  C3-targeting RNA guide sequence portion
agcgccuggcaggcugugugc

SEQ ID NO: 3581 - RNA, 21 nt, Artificial Sequence
  C3-targeting RNA guide sequence portion
agcgucagcaacuccuccaag

SEQ ID NO: 3582 - RNA, 21 nt, Artificial Sequence
  C3-targeting RNA guide sequence portion
agcugcaaacucccaaaucuu

SEQ ID NO: 3583 - RNA, 21 nt, Artificial Sequence
  C3-targeting RNA guide sequence portion
agcuggcugagagugggaguc

SEQ ID NO: 3584 - RNA, 21 nt, Artificial Sequence
  C3-targeting RNA guide sequence portion
agcugggccuggccuuugaaa

SEQ ID NO: 3585 - RNA, 21 nt, Artificial Sequence
  C3-targeting RNA guide sequence portion
agcuuggggacuugcaauuuu

SEQ ID NO: 3586 - RNA, 21 nt, Artificial Sequence
  C3-targeting RNA guide sequence portion
aggacagcagccaccaugacu

SEQ ID NO: 3587 - RNA, 21 nt, Artificial Sequence
  C3-targeting RNA guide sequence portion
aggaccagaggcuggggcaca

SEQ ID NO: 3588 - RNA, 21 nt, Artificial Sequence
  C3-targeting RNA guide sequence portion
aggacuggcgucucacauccg

SEQ ID NO: 3589 - RNA, 21 nt, Artificial Sequence
  C3-targeting RNA guide sequence portion
aggacugggguguuggagguu

SEQ ID NO: 3590 - RNA, 21 nt, Artificial Sequence
  C3-targeting RNA guide sequence portion
aggaguugcugacgcugguug

SEQ ID NO: 3591 - RNA, 21 nt, Artificial Sequence
  C3-targeting RNA guide sequence portion
aggauccagugacugccggcg

SEQ ID NO: 3592 - RNA, 21 nt, Artificial Sequence
  C3-targeting RNA guide sequence portion
aggcagcccaaauauauauaa

SEQ ID NO: 3593 - RNA, 21 nt, Artificial Sequence
  C3-targeting RNA guide sequence portion
aggccaggcccagcuggcuga

SEQ ID NO: 3594 - RNA, 21 nt, Artificial Sequence
  C3-targeting RNA guide sequence portion
aggcccagcuggcugagagug

SEQ ID NO: 3595 - RNA, 21 nt, Artificial Sequence
  C3-targeting RNA guide sequence portion
aggcgauugugggucuggaag

SEQ ID NO: 3596 - RNA, 21 nt, Artificial Sequence
  C3-targeting RNA guide sequence portion
aggcgcugacuccagugagga

SEQ ID NO: 3597 - RNA, 21 nt, Artificial Sequence
  C3-targeting RNA guide sequence portion
aggcuggggcacacagccugc

SEQ ID NO: 3598 - RNA, 21 nt, Artificial Sequence
  C3-targeting RNA guide sequence portion
aggcuggguuuggggugcucu

SEQ ID NO: 3599 - RNA, 21 nt, Artificial Sequence
  C3-targeting RNA guide sequence portion
aggcugugugccccagccucu

SEQ ID NO: 3600 - RNA, 21 nt, Artificial Sequence
  C3-targeting RNA guide sequence portion
aggcuuucaaaggccaggccc

SEQ ID NO: 3601 - RNA, 21 nt, Artificial Sequence
  C3-targeting RNA guide sequence portion
agggaccuggacccccaaaug

SEQ ID NO: 3602 - RNA, 21 nt, Artificial Sequence
  C3-targeting RNA guide sequence portion
agggcugguucugggguggaa

SEQ ID NO: 3603 - RNA, 21 nt, Artificial Sequence
  C3-targeting RNA guide sequence portion
agggggccacacaucccacca

SEQ ID NO: 3604 - RNA, 21 nt, Artificial Sequence
  C3-targeting RNA guide sequence portion
agggguuagcagguugggaau

SEQ ID NO: 3605 - RNA, 21 nt, Artificial Sequence
  C3-targeting RNA guide sequence portion
agggugcauuuggguguuugu

SEQ ID NO: 3606 - RNA, 21 nt, Artificial Sequence
  C3-targeting RNA guide sequence portion
aggguguaugugguguucauu

SEQ ID NO: 3607 - RNA, 21 nt, Artificial Sequence
  C3-targeting RNA guide sequence portion
aggguguccgggaguuugagu

SEQ ID NO: 3608 - RNA, 21 nt, Artificial Sequence
  C3-targeting RNA guide sequence portion
aggguuuggggcauguguggg

SEQ ID NO: 3609 - RNA, 21 nt, Artificial Sequence
  C3-targeting RNA guide sequence portion
aggguuuggugggaugugugg

SEQ ID NO: 3610 - RNA, 21 nt, Artificial Sequence
  C3-targeting RNA guide sequence portion
agguagagguuuaggguuugg

SEQ ID NO: 3611 - RNA, 21 nt, Artificial Sequence
  C3-targeting RNA guide sequence portion
agguagaguugaggguguccg

SEQ ID NO: 3612 - RNA, 21 nt, Artificial Sequence
  C3-targeting RNA guide sequence portion
agguaucguggaauuggaguu

SEQ ID NO: 3613 - RNA, 21 nt, Artificial Sequence
  C3-targeting RNA guide sequence portion
agguaugguggaauuggaguu

SEQ ID NO: 3614 - RNA, 21 nt, Artificial Sequence
  C3-targeting RNA guide sequence portion
aggucaucuguugguuuaggg

SEQ ID NO: 3615 - RNA, 21 nt, Artificial Sequence
  C3-targeting RNA guide sequence portion
aggucccuguagaauucaggg

SEQ ID NO: 3616 - RNA, 21 nt, Artificial Sequence
  C3-targeting RNA guide sequence portion
agguucaggguuuggugggau

SEQ ID NO: 3617 - RNA, 21 nt, Artificial Sequence
  C3-targeting RNA guide sequence portion
agguuuagagguuuuggcgua

SEQ ID NO: 3618 - RNA, 21 nt, Artificial Sequence
  C3-targeting RNA guide sequence portion
agguuuaggcuggguuugggg

SEQ ID NO: 3619 - RNA, 21 nt, Artificial Sequence
  C3-targeting RNA guide sequence portion
agguuuaggguuuggggcaug

SEQ ID NO: 3620 - RNA, 21 nt, Artificial Sequence
  C3-targeting RNA guide sequence portion
agguuuggacuuuacaagauu

SEQ ID NO: 3621 - RNA, 21 nt, Artificial Sequence
  C3-targeting RNA guide sequence portion
agguuuuggcguauguggguu

SEQ ID NO: 3622 - RNA, 21 nt, Artificial Sequence
  C3-targeting RNA guide sequence portion
aguagccaaucuuuaaaccca

SEQ ID NO: 3623 - RNA, 21 nt, Artificial Sequence
  C3-targeting RNA guide sequence portion
agucacuggauccucuccagg

SEQ ID NO: 3624 - RNA, 21 nt, Artificial Sequence
  C3-targeting RNA guide sequence portion
agucagcgccuggcaggcugu

SEQ ID NO: 3625 - RNA, 21 nt, Artificial Sequence
  C3-targeting RNA guide sequence portion
agucaugguggcugcuguccu

SEQ ID NO: 3626 - RNA, 21 nt, Artificial Sequence
  C3-targeting RNA guide sequence portion
aguccagagacuuggaggagu

SEQ ID NO: 3627 - RNA, 21 nt, Artificial Sequence
  C3-targeting RNA guide sequence portion
aguccccaagcugcaaacucc

SEQ ID NO: 3628 - RNA, 21 nt, Artificial Sequence
  C3-targeting RNA guide sequence portion
aguccucacuggagucagcgc

SEQ ID NO: 3629 - RNA, 21 nt, Artificial Sequence
  C3-targeting RNA guide sequence portion
agucucuggacuuccagaccc

SEQ ID NO: 3630 - RNA, 21 nt, Artificial Sequence
  C3-targeting RNA guide sequence portion
agugacugccggcgcacuugc

SEQ ID NO: 3631 - RNA, 21 nt, Artificial Sequence
  C3-targeting RNA guide sequence portion
agugaggacuggcgucucaca

SEQ ID NO: 3632 - RNA, 21 nt, Artificial Sequence
  C3-targeting RNA guide sequence portion
agugcccagagaagauaaugg

SEQ ID NO: 3633 - RNA, 21 nt, Artificial Sequence
  C3-targeting RNA guide sequence portion
agugcgccggcagucacugga

SEQ ID NO: 3634 - RNA, 21 nt, Artificial Sequence
  C3-targeting RNA guide sequence portion
agugggagucaugguggcugc

SEQ ID NO: 3635 - RNA, 21 nt, Artificial Sequence
  C3-targeting RNA guide sequence portion
agugggcuugucauuccacgg

SEQ ID NO: 3636 - RNA, 21 nt, Artificial Sequence
  C3-targeting RNA guide sequence portion
aguggggcacgggagugggcu

SEQ ID NO: 3637 - RNA, 21 nt, Artificial Sequence
  C3-targeting RNA guide sequence portion
agugguuaugacucuacccac

SEQ ID NO: 3638 - RNA, 21 nt, Artificial Sequence
  C3-targeting RNA guide sequence portion
aguguggguuuaaagauuggc

SEQ ID NO: 3639 - RNA, 21 nt, Artificial Sequence
  C3-targeting RNA guide sequence portion
aguguuuagagagguagaggu

SEQ ID NO: 3640 - RNA, 21 nt, Artificial Sequence
  C3-targeting RNA guide sequence portion
aguugaggguguccgggaguu

SEQ ID NO: 3641 - RNA, 21 nt, Artificial Sequence
  C3-targeting RNA guide sequence portion
aguugcugacgcugguuggaa

SEQ ID NO: 3642 - RNA, 21 nt, Artificial Sequence
  C3-targeting RNA guide sequence portion
aguuggggcauuuggaauuga

SEQ ID NO: 3643 - RNA, 21 nt, Artificial Sequence
  C3-targeting RNA guide sequence portion
aguuuauauacauuugggcug

SEQ ID NO: 3644 - RNA, 21 nt, Artificial Sequence
  C3-targeting RNA guide sequence portion
aguuugaguguuuacauauuu

SEQ ID NO: 3645 - RNA, 21 nt, Artificial Sequence
  C3-targeting RNA guide sequence portion
aguuugcagcuuggggacuug

SEQ ID NO: 3646 - RNA, 21 nt, Artificial Sequence
  C3-targeting RNA guide sequence portion
aguuugggauguuucuagaau

SEQ ID NO: 3647 - RNA, 21 nt, Artificial Sequence
  C3-targeting RNA guide sequence portion
aguuuggguguuuauggguug

SEQ ID NO: 3648 - RNA, 21 nt, Artificial Sequence
  C3-targeting RNA guide sequence portion
auaaacacccaaacucucagg

SEQ ID NO: 3649 - RNA, 21 nt, Artificial Sequence
  C3-targeting RNA guide sequence portion
auaaacuccaauuccacgaua

SEQ ID NO: 3650 - RNA, 21 nt, Artificial Sequence
  C3-targeting RNA guide sequence portion
auaaacuccaauuccaugaua

SEQ ID NO: 3651 - RNA, 21 nt, Artificial Sequence
  C3-targeting RNA guide sequence portion
auaaauacaaucaauuccaaa

SEQ ID NO: 3652 - RNA, 21 nt, Artificial Sequence
  C3-targeting RNA guide sequence portion
auaaucauucccaaccugcua

SEQ ID NO: 3653 - RNA, 21 nt, Artificial Sequence
  C3-targeting RNA guide sequence portion
auaauggcauuggcaagugcg

SEQ ID NO: 3654 - RNA, 21 nt, Artificial Sequence
  C3-targeting RNA guide sequence portion
auacaaucaauuccaaaugcc

SEQ ID NO: 3655 - RNA, 21 nt, Artificial Sequence
  C3-targeting RNA guide sequence portion
auacacccuaaaccaacagau

SEQ ID NO: 3656 - RNA, 21 nt, Artificial Sequence
  C3-targeting RNA guide sequence portion
auacaugaacccgaaguagcc

SEQ ID NO: 3657 - RNA, 21 nt, Artificial Sequence
  C3-targeting RNA guide sequence portion
auacauuugggcugccugaga

SEQ ID NO: 3658 - RNA, 21 nt, Artificial Sequence
  C3-targeting RNA guide sequence portion
auacauuugggcugccuguga

SEQ ID NO: 3659 - RNA, 21 nt, Artificial Sequence
  C3-targeting RNA guide sequence portion
auacgccaaaaccucuaaacc

SEQ ID NO: 3660 - RNA, 21 nt, Artificial Sequence
  C3-targeting RNA guide sequence portion
auaguuggggcauuuggaauu

SEQ ID NO: 3661 - RNA, 21 nt, Artificial Sequence
  C3-targeting RNA guide sequence portion
auauaaacuccaauuccacga

SEQ ID NO: 3662 - RNA, 21 nt, Artificial Sequence
  C3-targeting RNA guide sequence portion
auauaaacuccaauuccauga

SEQ ID NO: 3663 - RNA, 21 nt, Artificial Sequence
  C3-targeting RNA guide sequence portion
auauaaucauucccaaccugc

SEQ ID NO: 3664 - RNA, 21 nt, Artificial Sequence
  C3-targeting RNA guide sequence portion
auauacauuugggcugccuga

SEQ ID NO: 3665 - RNA, 21 nt, Artificial Sequence
  C3-targeting RNA guide sequence portion
auauacauuugggcugccugu

SEQ ID NO: 3666 - RNA, 21 nt, Artificial Sequence
  C3-targeting RNA guide sequence portion
auauauaaucauucccaaccu

SEQ ID NO: 3667 - RNA, 21 nt, Artificial Sequence
  C3-targeting RNA guide sequence portion
auauauauuugggcugccugu

SEQ ID NO: 3668 - RNA, 21 nt, Artificial Sequence
  C3-targeting RNA guide sequence portion
auauauuugggcugccuguga

SEQ ID NO: 3669 - RNA, 21 nt, Artificial Sequence
  C3-targeting RNA guide sequence portion
auauguaaacacucaaacucc

SEQ ID NO: 3670 - RNA, 21 nt, Artificial Sequence
  C3-targeting RNA guide sequence portion
auauuuggaguguuuagagag

SEQ ID NO: 3671 - RNA, 21 nt, Artificial Sequence
  C3-targeting RNA guide sequence portion
auauuugggcugccugugagu

SEQ ID NO: 3672 - RNA, 21 nt, Artificial Sequence
  C3-targeting RNA guide sequence portion
aucaaugaacaccacauacac

SEQ ID NO: 3673 - RNA, 21 nt, Artificial Sequence
  C3-targeting RNA guide sequence portion
aucaauuccaaaugccccaac

SEQ ID NO: 3674 - RNA, 21 nt, Artificial Sequence
  C3-targeting RNA guide sequence portion
aucauucccaaccugcuaacc

SEQ ID NO: 3675 - RNA, 21 nt, Artificial Sequence
  C3-targeting RNA guide sequence portion
auccacaaacacccaaaugca

SEQ ID NO: 3676 - RNA, 21 nt, Artificial Sequence
  C3-targeting RNA guide sequence portion
auccagguaucauggaauugg

SEQ ID NO: 3677 - RNA, 21 nt, Artificial Sequence
  C3-targeting RNA guide sequence portion
auccagguaucguggaauugg

SEQ ID NO: 3678 - RNA, 21 nt, Artificial Sequence
  C3-targeting RNA guide sequence portion
auccagguaugguggaauugg

SEQ ID NO: 3679 - RNA, 21 nt, Artificial Sequence
  C3-targeting RNA guide sequence portion
auccagugacugccggcgcac

SEQ ID NO: 3680 - RNA, 21 nt, Artificial Sequence
  C3-targeting RNA guide sequence portion
aucccaaacuccaauuccacc

SEQ ID NO: 3681 - RNA, 21 nt, Artificial Sequence
  C3-targeting RNA guide sequence portion
aucccaccaaacccugaaccu

SEQ ID NO: 3682 - RNA, 21 nt, Artificial Sequence
  C3-targeting RNA guide sequence portion
auccguggaaugacaagccca

SEQ ID NO: 3683 - RNA, 21 nt, Artificial Sequence
  C3-targeting RNA guide sequence portion
auccucuccaggaccagaggc

SEQ ID NO: 3684 - RNA, 21 nt, Artificial Sequence
  C3-targeting RNA guide sequence portion
aucgccuaaacccacacaugc

SEQ ID NO: 3685 - RNA, 21 nt, Artificial Sequence
  C3-targeting RNA guide sequence portion
aucuguugguuuaggguguau

SEQ ID NO: 3686 - RNA, 21 nt, Artificial Sequence
  C3-targeting RNA guide sequence portion
aucuuagagcaccccaaaccc

SEQ ID NO: 3687 - RNA, 21 nt, Artificial Sequence
  C3-targeting RNA guide sequence portion
aucuucucugggcacugccac

SEQ ID NO: 3688 - RNA, 21 nt, Artificial Sequence
  C3-targeting RNA guide sequence portion
aucuuguaaaguccaaaccuc

SEQ ID NO: 3689 - RNA, 21 nt, Artificial Sequence
  C3-targeting RNA guide sequence portion
aucuuuaaacccacacugaaa

SEQ ID NO: 3690 - RNA, 21 nt, Artificial Sequence
  C3-targeting RNA guide sequence portion
augaacaccacauacacccua

SEQ ID NO: 3691 - RNA, 21 nt, Artificial Sequence
  C3-targeting RNA guide sequence portion
augaacccgaaguagccaauc

SEQ ID NO: 3692 - RNA, 21 nt, Artificial Sequence
  C3-targeting RNA guide sequence portion
augacaagcccacucccgugc

SEQ ID NO: 3693 - RNA, 21 nt, Artificial Sequence
  C3-targeting RNA guide sequence portion
augaccucaauucuagaaaca

SEQ ID NO: 3694 - RNA, 21 nt, Artificial Sequence
  C3-targeting RNA guide sequence portion
augacucccacucucagccag

SEQ ID NO: 3695 - RNA, 21 nt, Artificial Sequence
  C3-targeting RNA guide sequence portion
augacucuacccacaaacagg

SEQ ID NO: 3696 - RNA, 21 nt, Artificial Sequence
  C3-targeting RNA guide sequence portion
augauaccuggauuccacaaa

SEQ ID NO: 3697 - RNA, 21 nt, Artificial Sequence
  C3-targeting RNA guide sequence portion
augauuauauauauuugggcu

SEQ ID NO: 3698 - RNA, 21 nt, Artificial Sequence
  C3-targeting RNA guide sequence portion
augcacccugaauucuacagg

SEQ ID NO: 3699 - RNA, 21 nt, Artificial Sequence
  C3-targeting RNA guide sequence portion
augccauuaucuucucugggc

SEQ ID NO: 3700 - RNA, 21 nt, Artificial Sequence
  C3-targeting RNA guide sequence portion
augccccaaacccuaaaccuc

SEQ ID NO: 3701 - RNA, 21 nt, Artificial Sequence
  C3-targeting RNA guide sequence portion
augccccaacuauacaugaac

SEQ ID NO: 3702 - RNA, 21 nt, Artificial Sequence
  C3-targeting RNA guide sequence portion
auggcauuggcaagugcgccg

SEQ ID NO: 3703 - RNA, 21 nt, Artificial Sequence
  C3-targeting RNA guide sequence portion
augggcaggacagcagccacc

SEQ ID NO: 3704 - RNA, 21 nt, Artificial Sequence
  C3-targeting RNA guide sequence portion
auggguuggguguuuguggaa

SEQ ID NO: 3705 - RNA, 21 nt, Artificial Sequence
  C3-targeting RNA guide sequence portion
augguggaauuggaguuuggg

SEQ ID NO: 3706 - RNA, 21 nt, Artificial Sequence
  C3-targeting RNA guide sequence portion
augguggcugcuguccugccc

SEQ ID NO: 3707 - RNA, 21 nt, Artificial Sequence
  C3-targeting RNA guide sequence portion
auguaaacacucaaacucccg

SEQ ID NO: 3708 - RNA, 21 nt, Artificial Sequence
  C3-targeting RNA guide sequence portion
auguauaguuggggcauuugg

SEQ ID NO: 3709 - RNA, 21 nt, Artificial Sequence
  C3-targeting RNA guide sequence portion
augucugcuuccaccccagaa

SEQ ID NO: 3710 - RNA, 21 nt, Artificial Sequence
  C3-targeting RNA guide sequence portion
augugagacgccaguccucac

SEQ ID NO: 3711 - RNA, 21 nt, Artificial Sequence
  C3-targeting RNA guide sequence portion
auguggguuuggguagguaga

SEQ ID NO: 3712 - RNA, 21 nt, Artificial Sequence
  C3-targeting RNA guide sequence portion
augugguguucauugauggug

SEQ ID NO: 3713 - RNA, 21 nt, Artificial Sequence
  C3-targeting RNA guide sequence portion
augugguugagacgguggcag

SEQ ID NO: 3714 - RNA, 21 nt, Artificial Sequence
  C3-targeting RNA guide sequence portion
auguguggcccccucguugcc

SEQ ID NO: 3715 - RNA, 21 nt, Artificial Sequence
  C3-targeting RNA guide sequence portion
auguguggguuuaggcgauug

SEQ ID NO: 3716 - RNA, 21 nt, Artificial Sequence
  C3-targeting RNA guide sequence portion
auguuucuagaauugagguca

SEQ ID NO: 3717 - RNA, 21 nt, Artificial Sequence
  C3-targeting RNA guide sequence portion
auuaggacugggguguuggag

SEQ ID NO: 3718 - RNA, 21 nt, Artificial Sequence
  C3-targeting RNA guide sequence portion
auuauauauauuugggcugcc

SEQ ID NO: 3719 - RNA, 21 nt, Artificial Sequence
  C3-targeting RNA guide sequence portion
auuaucuucucugggcacugc

SEQ ID NO: 3720 - RNA, 21 nt, Artificial Sequence
  C3-targeting RNA guide sequence portion
auucagggguuagcagguugg

SEQ ID NO: 3721 - RNA, 21 nt, Artificial Sequence
  C3-targeting RNA guide sequence portion
auucagggugcauuugggugu

SEQ ID NO: 3722 - RNA, 21 nt, Artificial Sequence
  C3-targeting RNA guide sequence portion
auuccaaaugccccaacuaua

SEQ ID NO: 3723 - RNA, 21 nt, Artificial Sequence
  C3-targeting RNA guide sequence portion
auuccacaaacacccaaccca

SEQ ID NO: 3724 - RNA, 21 nt, Artificial Sequence
  C3-targeting RNA guide sequence portion
auuccaccauaccuggauucc

SEQ ID NO: 3725 - RNA, 21 nt, Artificial Sequence
  C3-targeting RNA guide sequence portion
auuccacgauaccuggauucc

SEQ ID NO: 3726 - RNA, 21 nt, Artificial Sequence
  C3-targeting RNA guide sequence portion
auuccacggaugugagacgcc

SEQ ID NO: 3727 - RNA, 21 nt, Artificial Sequence
  C3-targeting RNA guide sequence portion
auuccaugauaccuggauucc

SEQ ID NO: 3728 - RNA, 21 nt, Artificial Sequence
  C3-targeting RNA guide sequence portion
auucccaaccugcuaaccccu

SEQ ID NO: 3729 - RNA, 21 nt, Artificial Sequence
  C3-targeting RNA guide sequence portion
auucuacagggaccuggaccc

SEQ ID NO: 3730 - RNA, 21 nt, Artificial Sequence
  C3-targeting RNA guide sequence portion
auucuagaaacaucccaaacu

SEQ ID NO: 3731 - RNA, 21 nt, Artificial Sequence
  C3-targeting RNA guide sequence portion
auugaggucaucuguugguuu

SEQ ID NO: 3732 - RNA, 21 nt, Artificial Sequence
  C3-targeting RNA guide sequence portion
auugauuguauuuauuaggac

SEQ ID NO: 3733 - RNA, 21 nt, Artificial Sequence
  C3-targeting RNA guide sequence portion
auugcaaguccccaagcugca

SEQ ID NO: 3734 - RNA, 21 nt, Artificial Sequence
  C3-targeting RNA guide sequence portion
auuggaguuugggauguuucu

SEQ ID NO: 3735 - RNA, 21 nt, Artificial Sequence
  C3-targeting RNA guide sequence portion
auuggcaagugcgccggcagu

SEQ ID NO: 3736 - RNA, 21 nt, Artificial Sequence
  C3-targeting RNA guide sequence portion
auuggcuacuucggguucaug

SEQ ID NO: 3737 - RNA, 21 nt, Artificial Sequence
  C3-targeting RNA guide sequence portion
auuguauuuauuaggacuggg

SEQ ID NO: 3738 - RNA, 21 nt, Artificial Sequence
  C3-targeting RNA guide sequence portion
auugugggucuggaaguccag

SEQ ID NO: 3739 - RNA, 21 nt, Artificial Sequence
  C3-targeting RNA guide sequence portion
auuuauuaggacugggguguu

SEQ ID NO: 3740 - RNA, 21 nt, Artificial Sequence
  C3-targeting RNA guide sequence portion
auuugagguuuagagguuuug

SEQ ID NO: 3741 - RNA, 21 nt, Artificial Sequence
  C3-targeting RNA guide sequence portion
auuuggaguguuuagagaggu

SEQ ID NO: 3742 - RNA, 21 nt, Artificial Sequence
  C3-targeting RNA guide sequence portion
auuugggaguuugcagcuugg

SEQ ID NO: 3743 - RNA, 21 nt, Artificial Sequence
  C3-targeting RNA guide sequence portion
auuugggcugccugagaguuu

SEQ ID NO: 3744 - RNA, 21 nt, Artificial Sequence
  C3-targeting RNA guide sequence portion
auuuggggguccaggucccug

SEQ ID NO: 3745 - RNA, 21 nt, Artificial Sequence
  C3-targeting RNA guide sequence portion
auuuggguguuuguggauuca

SEQ ID NO: 3746 - RNA, 21 nt, Artificial Sequence
  C3-targeting RNA guide sequence portion
auuuucaguguggguuuaaag

SEQ ID NO: 3747 - RNA, 21 nt, Artificial Sequence
  C3-targeting RNA guide sequence portion
caaaaccucuaaaccucaaau

SEQ ID NO: 3748 - RNA, 21 nt, Artificial Sequence
  C3-targeting RNA guide sequence portion
caaacacccaaaugcacccug

SEQ ID NO: 3749 - RNA, 21 nt, Artificial Sequence
  C3-targeting RNA guide sequence portion
caaacacccaacccauaaaca

SEQ ID NO: 3750 - RNA, 21 nt, Artificial Sequence
  C3-targeting RNA guide sequence portion
caaacagggcugguucugggg

SEQ ID NO: 3751 - RNA, 21 nt, Artificial Sequence
  C3-targeting RNA guide sequence portion
caaacccacauacgccaaaac

SEQ ID NO: 3752 - RNA, 21 nt, Artificial Sequence
  C3-targeting RNA guide sequence portion
caaacccagccuaaaccucca

SEQ ID NO: 3753 - RNA, 21 nt, Artificial Sequence
  C3-targeting RNA guide sequence portion
caaacccuaaaccucuaccuc

SEQ ID NO: 3754 - RNA, 21 nt, Artificial Sequence
  C3-targeting RNA guide sequence portion
caaacccugaaccuuccaacc

SEQ ID NO: 3755 - RNA, 21 nt, Artificial Sequence
  C3-targeting RNA guide sequence portion
caaacucacaggcagcccaaa

SEQ ID NO: 3756 - RNA, 21 nt, Artificial Sequence
  C3-targeting RNA guide sequence portion
caaacuccaauuccaccauac

SEQ ID NO: 3757 - RNA, 21 nt, Artificial Sequence
  C3-targeting RNA guide sequence portion
caaacucccaaaucuuguaaa

SEQ ID NO: 3758 - RNA, 21 nt, Artificial Sequence
  C3-targeting RNA guide sequence portion
caaacucccggacacccucaa

SEQ ID NO: 3759 - RNA, 21 nt, Artificial Sequence
  C3-targeting RNA guide sequence portion
caaacucucaggcagcccaaa

SEQ ID NO: 3760 - RNA, 21 nt, Artificial Sequence
  C3-targeting RNA guide sequence portion
caaaggccaggcccagcuggc

SEQ ID NO: 3761 - RNA, 21 nt, Artificial Sequence
  C3-targeting RNA guide sequence portion
caaauauguaaacacucaaac

SEQ ID NO: 3762 - RNA, 21 nt, Artificial Sequence
  C3-targeting RNA guide sequence portion
caaaucuuagagcaccccaaa

SEQ ID NO: 3763 - RNA, 21 nt, Artificial Sequence
  C3-targeting RNA guide sequence portion
caaaucuuguaaaguccaaac

SEQ ID NO: 3764 - RNA, 21 nt, Artificial Sequence
  C3-targeting RNA guide sequence portion
caaaugcacccugaauucuac

SEQ ID NO: 3765 - RNA, 21 nt, Artificial Sequence
  C3-targeting RNA guide sequence portion
caaaugccccaacuauacaug

SEQ ID NO: 3766 - RNA, 21 nt, Artificial Sequence
  C3-targeting RNA guide sequence portion
caaauguauauaaacuccaau

SEQ ID NO: 3767 - RNA, 21 nt, Artificial Sequence
  C3-targeting RNA guide sequence portion
caaaugucugcuuccacccca

SEQ ID NO: 3768 - RNA, 21 nt, Artificial Sequence
  C3-targeting RNA guide sequence portion
caacaccccaguccuaauaaa

SEQ ID NO: 3769 - RNA, 21 nt, Artificial Sequence
  C3-targeting RNA guide sequence portion
caacagaugaccucaauucua

SEQ ID NO: 3770 - RNA, 21 nt, Artificial Sequence
  C3-targeting RNA guide sequence portion
caaccacaugggcaggacagc

SEQ ID NO: 3771 - RNA, 21 nt, Artificial Sequence
  C3-targeting RNA guide sequence portion
caaccagcgucagcaacuccu

SEQ ID NO: 3772 - RNA, 21 nt, Artificial Sequence
  C3-targeting RNA guide sequence portion
caacccauaaacacccaaacu

SEQ ID NO: 3773 - RNA, 21 nt, Artificial Sequence
  C3-targeting RNA guide sequence portion
caaccgcaccaucaaugaaca

SEQ ID NO: 3774 - RNA, 21 nt, Artificial Sequence
  C3-targeting RNA guide sequence portion
caaccugcuaaccccugaauc

SEQ ID NO: 3775 - RNA, 21 nt, Artificial Sequence
  C3-targeting RNA guide sequence portion
caacgagggggccacacaucc

SEQ ID NO: 3776 - RNA, 21 nt, Artificial Sequence
  C3-targeting RNA guide sequence portion
caacuauacaugaacccgaag

SEQ ID NO: 3777 - RNA, 21 nt, Artificial Sequence
  C3-targeting RNA guide sequence portion
caacuccuccaagucucugga

SEQ ID NO: 3778 - RNA, 21 nt, Artificial Sequence
  C3-targeting RNA guide sequence portion
caacucuaccuacccaaaccc

SEQ ID NO: 3779 - RNA, 21 nt, Artificial Sequence
  C3-targeting RNA guide sequence portion
caagauuugggaguuugcagc

SEQ ID NO: 3780 - RNA, 21 nt, Artificial Sequence
  C3-targeting RNA guide sequence portion
caagcccacucccgugcccca

SEQ ID NO: 3781 - RNA, 21 nt, Artificial Sequence
  C3-targeting RNA guide sequence portion
caagcugcaaacucccaaauc

SEQ ID NO: 3782 - RNA, 21 nt, Artificial Sequence
  C3-targeting RNA guide sequence portion
caaguccccaagcugcaaacu

SEQ ID NO: 3783 - RNA, 21 nt, Artificial Sequence
  C3-targeting RNA guide sequence portion
caagucucuggacuuccagac

SEQ ID NO: 3784 - RNA, 21 nt, Artificial Sequence
  C3-targeting RNA guide sequence portion
caagugcgccggcagucacug

SEQ ID NO: 3785 - RNA, 21 nt, Artificial Sequence
  C3-targeting RNA guide sequence portion
caaucaauuccaaaugcccca

SEQ ID NO: 3786 - RNA, 21 nt, Artificial Sequence
  C3-targeting RNA guide sequence portion
caaucgccuaaacccacacau

SEQ ID NO: 3787 - RNA, 21 nt, Artificial Sequence
  C3-targeting RNA guide sequence portion
caaucuuuaaacccacacuga

SEQ ID NO: 3788 - RNA, 21 nt, Artificial Sequence
  C3-targeting RNA guide sequence portion
caaugaacaccacauacaccc

SEQ ID NO: 3789 - RNA, 21 nt, Artificial Sequence
  C3-targeting RNA guide sequence portion
caaugccauuaucuucucugg

SEQ ID NO: 3790 - RNA, 21 nt, Artificial Sequence
  C3-targeting RNA guide sequence portion
caauuccaaaugccccaacua

SEQ ID NO: 3791 - RNA, 21 nt, Artificial Sequence
  C3-targeting RNA guide sequence portion
caauuccaccauaccuggauu

SEQ ID NO: 3792 - RNA, 21 nt, Artificial Sequence
  C3-targeting RNA guide sequence portion
caauuccacgauaccuggauu

SEQ ID NO: 3793 - RNA, 21 nt, Artificial Sequence
  C3-targeting RNA guide sequence portion
caauuccaugauaccuggauu

SEQ ID NO: 3794 - RNA, 21 nt, Artificial Sequence
  C3-targeting RNA guide sequence portion
caauucuagaaacaucccaaa

SEQ ID NO: 3795 - RNA, 21 nt, Artificial Sequence
  C3-targeting RNA guide sequence portion
caauuuucaguguggguuuaa

SEQ ID NO: 3796 - RNA, 21 nt, Artificial Sequence
  C3-targeting RNA guide sequence portion
cacaaacacccaaaugcaccc

SEQ ID NO: 3797 - RNA, 21 nt, Artificial Sequence
  C3-targeting RNA guide sequence portion
cacaaacacccaacccauaaa

SEQ ID NO: 3798 - RNA, 21 nt, Artificial Sequence
  C3-targeting RNA guide sequence portion
cacaaacagggcugguucugg

SEQ ID NO: 3799 - RNA, 21 nt, Artificial Sequence
  C3-targeting RNA guide sequence portion
cacaaucgccuaaacccacac

SEQ ID NO: 3800 - RNA, 21 nt, Artificial Sequence
  C3-targeting RNA guide sequence portion
cacacagccugccaggcgcug

SEQ ID NO: 3801 - RNA, 21 nt, Artificial Sequence
  C3-targeting RNA guide sequence portion
cacacaucccaccaaacccug

SEQ ID NO: 3802 - RNA, 21 nt, Artificial Sequence
  C3-targeting RNA guide sequence portion
cacacaugccccaaacccuaa

SEQ ID NO: 3803 - RNA, 21 nt, Artificial Sequence
  C3-targeting RNA guide sequence portion
cacacugaaaauugcaagucc

SEQ ID NO: 3804 - RNA, 21 nt, Artificial Sequence
  C3-targeting RNA guide sequence portion
cacagccugccaggcgcugac

SEQ ID NO: 3805 - RNA, 21 nt, Artificial Sequence
  C3-targeting RNA guide sequence portion
cacaggcagcccaaauauaua

SEQ ID NO: 3806 - RNA, 21 nt, Artificial Sequence
  C3-targeting RNA guide sequence portion
cacaggcagcccaaauguaua

SEQ ID NO: 3807 - RNA, 21 nt, Artificial Sequence
  C3-targeting RNA guide sequence portion
cacauacacccuaaaccaaca

SEQ ID NO: 3808 - RNA, 21 nt, Artificial Sequence
  C3-targeting RNA guide sequence portion
cacauacgccaaaaccucuaa

SEQ ID NO: 3809 - RNA, 21 nt, Artificial Sequence
  C3-targeting RNA guide sequence portion
cacaucccaccaaacccugaa

SEQ ID NO: 3810 - RNA, 21 nt, Artificial Sequence
  C3-targeting RNA guide sequence portion
cacauccguggaaugacaagc

SEQ ID NO: 3811 - RNA, 21 nt, Artificial Sequence
  C3-targeting RNA guide sequence portion
cacaugccccaaacccuaaac

SEQ ID NO: 3812 - RNA, 21 nt, Artificial Sequence
  C3-targeting RNA guide sequence portion
cacaugggcaggacagcagcc

SEQ ID NO: 3813 - RNA, 21 nt, Artificial Sequence
  C3-targeting RNA guide sequence portion
caccaaacccugaaccuucca

SEQ ID NO: 3814 - RNA, 21 nt, Artificial Sequence
  C3-targeting RNA guide sequence portion
caccacauacacccuaaacca

SEQ ID NO: 3815 - RNA, 21 nt, Artificial Sequence
  C3-targeting RNA guide sequence portion
caccauaccuggauuccacaa

SEQ ID NO: 3816 - RNA, 21 nt, Artificial Sequence
  C3-targeting RNA guide sequence portion
caccaucaaugaacaccacau

SEQ ID NO: 3817 - RNA, 21 nt, Artificial Sequence
  C3-targeting RNA guide sequence portion
caccaugacucccacucucag

SEQ ID NO: 3818 - RNA, 21 nt, Artificial Sequence
  C3-targeting RNA guide sequence portion
cacccaaacucacaggcagcc

SEQ ID NO: 3819 - RNA, 21 nt, Artificial Sequence
  C3-targeting RNA guide sequence portion
cacccaaacucucaggcagcc

SEQ ID NO: 3820 - RNA, 21 nt, Artificial Sequence
  C3-targeting RNA guide sequence portion
cacccaaaugcacccugaauu

SEQ ID NO: 3821 - RNA, 21 nt, Artificial Sequence
  C3-targeting RNA guide sequence portion
cacccaacccauaaacaccca

SEQ ID NO: 3822 - RNA, 21 nt, Artificial Sequence
  C3-targeting RNA guide sequence portion
caccccaaacccagccuaaac

SEQ ID NO: 3823 - RNA, 21 nt, Artificial Sequence
  C3-targeting RNA guide sequence portion
caccccagaaccagcccuguu

SEQ ID NO: 3824 - RNA, 21 nt, Artificial Sequence
  C3-targeting RNA guide sequence portion
caccccaguccuaauaaauac

SEQ ID NO: 3825 - RNA, 21 nt, Artificial Sequence
  C3-targeting RNA guide sequence portion
cacccuaaaccaacagaugac

SEQ ID NO: 3826 - RNA, 21 nt, Artificial Sequence
  C3-targeting RNA guide sequence portion
cacccucaacucuaccuaccc

SEQ ID NO: 3827 - RNA, 21 nt, Artificial Sequence
  C3-targeting RNA guide sequence portion
cacccugaauucuacagggac

SEQ ID NO: 3828 - RNA, 21 nt, Artificial Sequence
  C3-targeting RNA guide sequence portion
caccgucucaaccacaugggc

SEQ ID NO: 3829 - RNA, 21 nt, Artificial Sequence
  C3-targeting RNA guide sequence portion
cacgauaccuggauuccacaa

SEQ ID NO: 3830 - RNA, 21 nt, Artificial Sequence
  C3-targeting RNA guide sequence portion
cacggaugugagacgccaguc

SEQ ID NO: 3831 - RNA, 21 nt, Artificial Sequence
  C3-targeting RNA guide sequence portion
cacgggagugggcuugucauu

SEQ ID NO: 3832 - RNA, 21 nt, Artificial Sequence
  C3-targeting RNA guide sequence portion
cacucaaacucccggacaccc

SEQ ID NO: 3833 - RNA, 21 nt, Artificial Sequence
  C3-targeting RNA guide sequence portion
cacuccaaauauguaaacacu

SEQ ID NO: 3834 - RNA, 21 nt, Artificial Sequence
  C3-targeting RNA guide sequence portion
cacucucagccagcugggccu

SEQ ID NO: 3835 - RNA, 21 nt, Artificial Sequence
  C3-targeting RNA guide sequence portion
cacugaaaauugcaagucccc

SEQ ID NO: 3836 - RNA, 21 nt, Artificial Sequence
  C3-targeting RNA guide sequence portion
cacugccaccgucucaaccac

SEQ ID NO: 3837 - RNA, 21 nt, Artificial Sequence
  C3-targeting RNA guide sequence portion
cacuggagucagcgccuggca

SEQ ID NO: 3838 - RNA, 21 nt, Artificial Sequence
  C3-targeting RNA guide sequence portion
cacuggauccucuccaggacc

SEQ ID NO: 3839 - RNA, 21 nt, Artificial Sequence
  C3-targeting RNA guide sequence portion
cacuugccaaugccauuaucu

SEQ ID NO: 3840 - RNA, 21 nt, Artificial Sequence
  C3-targeting RNA guide sequence portion
cagaaccagcccuguuugugg

SEQ ID NO: 3841 - RNA, 21 nt, Artificial Sequence
  C3-targeting RNA guide sequence portion
cagacauuuggggguccaggu

SEQ ID NO: 3842 - RNA, 21 nt, Artificial Sequence
  C3-targeting RNA guide sequence portion
cagacccacaaucgccuaaac

SEQ ID NO: 3843 - RNA, 21 nt, Artificial Sequence
  C3-targeting RNA guide sequence portion
cagagaagauaauggcauugg

SEQ ID NO: 3844 - RNA, 21 nt, Artificial Sequence
  C3-targeting RNA guide sequence portion
cagagacuuggaggaguugcu

SEQ ID NO: 3845 - RNA, 21 nt, Artificial Sequence
  C3-targeting RNA guide sequence portion
cagaggcuggggcacacagcc

SEQ ID NO: 3846 - RNA, 21 nt, Artificial Sequence
  C3-targeting RNA guide sequence portion
cagaugaccucaauucuagaa

SEQ ID NO: 3847 - RNA, 21 nt, Artificial Sequence
  C3-targeting RNA guide sequence portion
cagcaacuccuccaagucucu

SEQ ID NO: 3848 - RNA, 21 nt, Artificial Sequence
  C3-targeting RNA guide sequence portion
cagcagccaccaugacuccca

SEQ ID NO: 3849 - RNA, 21 nt, Artificial Sequence
  C3-targeting RNA guide sequence portion
cagccaccaugacucccacuc

SEQ ID NO: 3850 - RNA, 21 nt, Artificial Sequence
  C3-targeting RNA guide sequence portion
cagccagcugggccuggccuu

SEQ ID NO: 3851 - RNA, 21 nt, Artificial Sequence
  C3-targeting RNA guide sequence portion
cagcccaaauauauauaauca

SEQ ID NO: 3852 - RNA, 21 nt, Artificial Sequence
  C3-targeting RNA guide sequence portion
cagcccuguuuguggguagag

SEQ ID NO: 3853 - RNA, 21 nt, Artificial Sequence
  C3-targeting RNA guide sequence portion
cagccuaaaccuccaacaccc

SEQ ID NO: 3854 - RNA, 21 nt, Artificial Sequence
  C3-targeting RNA guide sequence portion
cagccucugguccuggagagg

SEQ ID NO: 3855 - RNA, 21 nt, Artificial Sequence
  C3-targeting RNA guide sequence portion
cagccugccaggcgcugacuc

SEQ ID NO: 3856 - RNA, 21 nt, Artificial Sequence
  C3-targeting RNA guide sequence portion
cagcgccuggcaggcugugug

SEQ ID NO: 3857 - RNA, 21 nt, Artificial Sequence
  C3-targeting RNA guide sequence portion
cagcgucagcaacuccuccaa

SEQ ID NO: 3858 - RNA, 21 nt, Artificial Sequence
  C3-targeting RNA guide sequence portion
cagcuggcugagagugggagu

SEQ ID NO: 3859 - RNA, 21 nt, Artificial Sequence
  C3-targeting RNA guide sequence portion
cagcugggccuggccuuugaa

SEQ ID NO: 3860 - RNA, 21 nt, Artificial Sequence
  C3-targeting RNA guide sequence portion
cagcuuggggacuugcaauuu

SEQ ID NO: 3861 - RNA, 21 nt, Artificial Sequence
  C3-targeting RNA guide sequence portion
caggacagcagccaccaugac

SEQ ID NO: 3862 - RNA, 21 nt, Artificial Sequence
  C3-targeting RNA guide sequence portion
caggaccagaggcuggggcac

SEQ ID NO: 3863 - RNA, 21 nt, Artificial Sequence
  C3-targeting RNA guide sequence portion
caggcagcccaaauauauaua

SEQ ID NO: 3864 - RNA, 21 nt, Artificial Sequence
  C3-targeting RNA guide sequence portion
caggcccagcuggcugagagu

SEQ ID NO: 3865 - RNA, 21 nt, Artificial Sequence
  C3-targeting RNA guide sequence portion
caggcgcugacuccagugagg

SEQ ID NO: 3866 - RNA, 21 nt, Artificial Sequence
  C3-targeting RNA guide sequence portion
caggcugugugccccagccuc

SEQ ID NO: 3867 - RNA, 21 nt, Artificial Sequence
  C3-targeting RNA guide sequence portion
caggcuuucaaaggccaggcc

SEQ ID NO: 3868 - RNA, 21 nt, Artificial Sequence
  C3-targeting RNA guide sequence portion
cagggaccuggacccccaaau

SEQ ID NO: 3869 - RNA, 21 nt, Artificial Sequence
  C3-targeting RNA guide sequence portion
cagggcugguucuggggugga

SEQ ID NO: 3870 - RNA, 21 nt, Artificial Sequence
  C3-targeting RNA guide sequence portion
cagggguuagcagguugggaa

SEQ ID NO: 3871 - RNA, 21 nt, Artificial Sequence
  C3-targeting RNA guide sequence portion
cagggugcauuuggguguuug

SEQ ID NO: 3872 - RNA, 21 nt, Artificial Sequence
  C3-targeting RNA guide sequence portion
caggguuuggugggaugugug

SEQ ID NO: 3873 - RNA, 21 nt, Artificial Sequence
  C3-targeting RNA guide sequence portion
cagguaucauggaauuggagu

SEQ ID NO: 3874 - RNA, 21 nt, Artificial Sequence
  C3-targeting RNA guide sequence portion
cagguaucguggaauuggagu

SEQ ID NO: 3875 - RNA, 21 nt, Artificial Sequence
  C3-targeting RNA guide sequence portion
cagguaugguggaauuggagu

SEQ ID NO: 3876 - RNA, 21 nt, Artificial Sequence
  C3-targeting RNA guide sequence portion
caggucccuguagaauucagg

SEQ ID NO: 3877 - RNA, 21 nt, Artificial Sequence
  C3-targeting RNA guide sequence portion
cagucacuggauccucuccag

SEQ ID NO: 3878 - RNA, 21 nt, Artificial Sequence
  C3-targeting RNA guide sequence portion
caguccucacuggagucagcg

SEQ ID NO: 3879 - RNA, 21 nt, Artificial Sequence
  C3-targeting RNA guide sequence portion
cagugacugccggcgcacuug

SEQ ID NO: 3880 - RNA, 21 nt, Artificial Sequence
  C3-targeting RNA guide sequence portion
cagugaggacuggcgucucac

SEQ ID NO: 3881 - RNA, 21 nt, Artificial Sequence
  C3-targeting RNA guide sequence portion
cagugcccagagaagauaaug

SEQ ID NO: 3882 - RNA, 21 nt, Artificial Sequence
  C3-targeting RNA guide sequence portion
caguguggguuuaaagauugg

SEQ ID NO: 3883 - RNA, 21 nt, Artificial Sequence
  C3-targeting RNA guide sequence portion
cauaaacacccaaacucucag

SEQ ID NO: 3884 - RNA, 21 nt, Artificial Sequence
  C3-targeting RNA guide sequence portion
cauacacccuaaaccaacaga

SEQ ID NO: 3885 - RNA, 21 nt, Artificial Sequence
  C3-targeting RNA guide sequence portion
cauaccuggauuccacaaaca

SEQ ID NO: 3886 - RNA, 21 nt, Artificial Sequence
  C3-targeting RNA guide sequence portion
cauacgccaaaaccucuaaac

SEQ ID NO: 3887 - RNA, 21 nt, Artificial Sequence
  C3-targeting RNA guide sequence portion
cauauuuggaguguuuagaga

SEQ ID NO: 3888 - RNA, 21 nt, Artificial Sequence
  C3-targeting RNA guide sequence portion
caucaaugaacaccacauaca

SEQ ID NO: 3889 - RNA, 21 nt, Artificial Sequence
  C3-targeting RNA guide sequence portion
caucccaaacuccaauuccac

SEQ ID NO: 3890 - RNA, 21 nt, Artificial Sequence
  C3-targeting RNA guide sequence portion
caucccaccaaacccugaacc

SEQ ID NO: 3891 - RNA, 21 nt, Artificial Sequence
  C3-targeting RNA guide sequence portion
cauccguggaaugacaagccc

SEQ ID NO: 3892 - RNA, 21 nt, Artificial Sequence
  C3-targeting RNA guide sequence portion
caucuguugguuuagggugua

SEQ ID NO: 3893 - RNA, 21 nt, Artificial Sequence
  C3-targeting RNA guide sequence portion
caugaacccgaaguagccaau

SEQ ID NO: 3894 - RNA, 21 nt, Artificial Sequence
  C3-targeting RNA guide sequence portion
caugacucccacucucagcca

SEQ ID NO: 3895 - RNA, 21 nt, Artificial Sequence
  C3-targeting RNA guide sequence portion
caugauaccuggauuccacaa

SEQ ID NO: 3896 - RNA, 21 nt, Artificial Sequence
  C3-targeting RNA guide sequence portion
caugccccaaacccuaaaccu

SEQ ID NO: 3897 - RNA, 21 nt, Artificial Sequence
  C3-targeting RNA guide sequence portion
caugggcaggacagcagccac

SEQ ID NO: 3898 - RNA, 21 nt, Artificial Sequence
  C3-targeting RNA guide sequence portion
caugguggcugcuguccugcc

SEQ ID NO: 3899 - RNA, 21 nt, Artificial Sequence
  C3-targeting RNA guide sequence portion
cauguauaguuggggcauuug

SEQ ID NO: 3900 - RNA, 21 nt, Artificial Sequence
  C3-targeting RNA guide sequence portion
caugugguugagacgguggca

SEQ ID NO: 3901 - RNA, 21 nt, Artificial Sequence
  C3-targeting RNA guide sequence portion
cauguguggguuuaggcgauu

SEQ ID NO: 3902 - RNA, 21 nt, Artificial Sequence
  C3-targeting RNA guide sequence portion
cauuaucuucucugggcacug

SEQ ID NO: 3903 - RNA, 21 nt, Artificial Sequence
  C3-targeting RNA guide sequence portion
cauuccacggaugugagacgc

SEQ ID NO: 3904 - RNA, 21 nt, Artificial Sequence
  C3-targeting RNA guide sequence portion
cauucccaaccugcuaacccc

SEQ ID NO: 3905 - RNA, 21 nt, Artificial Sequence
  C3-targeting RNA guide sequence portion
cauuggcaagugcgccggcag

SEQ ID NO: 3906 - RNA, 21 nt, Artificial Sequence
  C3-targeting RNA guide sequence portion
cauuugggcugccugagaguu

SEQ ID NO: 3907 - RNA, 21 nt, Artificial Sequence
  C3-targeting RNA guide sequence portion
cauuugggcugccugugaguu

SEQ ID NO: 3908 - RNA, 21 nt, Artificial Sequence
  C3-targeting RNA guide sequence portion
cauuuggggguccaggucccu

SEQ ID NO: 3909 - RNA, 21 nt, Artificial Sequence
  C3-targeting RNA guide sequence portion
cauuuggguguuuguggauuc

SEQ ID NO: 3910 - RNA, 21 nt, Artificial Sequence
  C3-targeting RNA guide sequence portion
ccaaaaccucuaaaccucaaa

SEQ ID NO: 3911 - RNA, 21 nt, Artificial Sequence
  C3-targeting RNA guide sequence portion
ccaaacccacauacgccaaaa

SEQ ID NO: 3912 - RNA, 21 nt, Artificial Sequence
  C3-targeting RNA guide sequence portion
ccaaacccagccuaaaccucc

SEQ ID NO: 3913 - RNA, 21 nt, Artificial Sequence
  C3-targeting RNA guide sequence portion
ccaaacccuaaaccucuaccu

SEQ ID NO: 3914 - RNA, 21 nt, Artificial Sequence
  C3-targeting RNA guide sequence portion
ccaaacccugaaccuuccaac

SEQ ID NO: 3915 - RNA, 21 nt, Artificial Sequence
  C3-targeting RNA guide sequence portion
ccaaacucacaggcagcccaa

SEQ ID NO: 3916 - RNA, 21 nt, Artificial Sequence
  C3-targeting RNA guide sequence portion
ccaaacuccaauuccaccaua

SEQ ID NO: 3917 - RNA, 21 nt, Artificial Sequence
  C3-targeting RNA guide sequence portion
ccaaacucucaggcagcccaa

SEQ ID NO: 3918 - RNA, 21 nt, Artificial Sequence
  C3-targeting RNA guide sequence portion
ccaaauauguaaacacucaaa

SEQ ID NO: 3919 - RNA, 21 nt, Artificial Sequence
  C3-targeting RNA guide sequence portion
ccaaaucuuguaaaguccaaa

SEQ ID NO: 3920 - RNA, 21 nt, Artificial Sequence
  C3-targeting RNA guide sequence portion
ccaaaugcacccugaauucua

SEQ ID NO: 3921 - RNA, 21 nt, Artificial Sequence
  C3-targeting RNA guide sequence portion
ccaaaugccccaacuauacau

SEQ ID NO: 3922 - RNA, 21 nt, Artificial Sequence
  C3-targeting RNA guide sequence portion
ccaaauguauauaaacuccaa

SEQ ID NO: 3923 - RNA, 21 nt, Artificial Sequence
  C3-targeting RNA guide sequence portion
ccaaaugucugcuuccacccc

SEQ ID NO: 3924 - RNA, 21 nt, Artificial Sequence
  C3-targeting RNA guide sequence portion
ccaacaccccaguccuaauaa

SEQ ID NO: 3925 - RNA, 21 nt, Artificial Sequence
  C3-targeting RNA guide sequence portion
ccaacagaugaccucaauucu

SEQ ID NO: 3926 - RNA, 21 nt, Artificial Sequence
  C3-targeting RNA guide sequence portion
ccaaccagcgucagcaacucc

SEQ ID NO: 3927 - RNA, 21 nt, Artificial Sequence
  C3-targeting RNA guide sequence portion
ccaacccauaaacacccaaac

SEQ ID NO: 3928 - RNA, 21 nt, Artificial Sequence
  C3-targeting RNA guide sequence portion
ccaaccgcaccaucaaugaac

SEQ ID NO: 3929 - RNA, 21 nt, Artificial Sequence
  C3-targeting RNA guide sequence portion
ccaaccugcuaaccccugaau

SEQ ID NO: 3930 - RNA, 21 nt, Artificial Sequence
  C3-targeting RNA guide sequence portion
ccaacuauacaugaacccgaa

SEQ ID NO: 3931 - RNA, 21 nt, Artificial Sequence
  C3-targeting RNA guide sequence portion
ccaagcugcaaacucccaaau

SEQ ID NO: 3932 - RNA, 21 nt, Artificial Sequence
  C3-targeting RNA guide sequence portion
ccaagucucuggacuuccaga

SEQ ID NO: 3933 - RNA, 21 nt, Artificial Sequence
  C3-targeting RNA guide sequence portion
ccaaucuuuaaacccacacug

SEQ ID NO: 3934 - RNA, 21 nt, Artificial Sequence
  C3-targeting RNA guide sequence portion
ccaaugccauuaucuucucug

SEQ ID NO: 3935 - RNA, 21 nt, Artificial Sequence
  C3-targeting RNA guide sequence portion
ccaauuccaccauaccuggau

SEQ ID NO: 3936 - RNA, 21 nt, Artificial Sequence
  C3-targeting RNA guide sequence portion
ccaauuccacgauaccuggau

SEQ ID NO: 3937 - RNA, 21 nt, Artificial Sequence
  C3-targeting RNA guide sequence portion
ccaauuccaugauaccuggau

SEQ ID NO: 3938 - RNA, 21 nt, Artificial Sequence
  C3-targeting RNA guide sequence portion
ccacaaacacccaaaugcacc

SEQ ID NO: 3939 - RNA, 21 nt, Artificial Sequence
  C3-targeting RNA guide sequence portion
ccacaaacacccaacccauaa

SEQ ID NO: 3940 - RNA, 21 nt, Artificial Sequence
  C3-targeting RNA guide sequence portion
ccacaaacagggcugguucug

SEQ ID NO: 3941 - RNA, 21 nt, Artificial Sequence
  C3-targeting RNA guide sequence portion
ccacaaucgccuaaacccaca

SEQ ID NO: 3942 - RNA, 21 nt, Artificial Sequence
  C3-targeting RNA guide sequence portion
ccacacaucccaccaaacccu

SEQ ID NO: 3943 - RNA, 21 nt, Artificial Sequence
  C3-targeting RNA guide sequence portion
ccacacaugccccaaacccua

SEQ ID NO: 3944 - RNA, 21 nt, Artificial Sequence
  C3-targeting RNA guide sequence portion
ccacacugaaaauugcaaguc

SEQ ID NO: 3945 - RNA, 21 nt, Artificial Sequence
  C3-targeting RNA guide sequence portion
ccacauacacccuaaaccaac

SEQ ID NO: 3946 - RNA, 21 nt, Artificial Sequence
  C3-targeting RNA guide sequence portion
ccacauacgccaaaaccucua

SEQ ID NO: 3947 - RNA, 21 nt, Artificial Sequence
  C3-targeting RNA guide sequence portion
ccacaugggcaggacagcagc

SEQ ID NO: 3948 - RNA, 21 nt, Artificial Sequence
  C3-targeting RNA guide sequence portion
ccaccaaacccugaaccuucc

SEQ ID NO: 3949 - RNA, 21 nt, Artificial Sequence
  C3-targeting RNA guide sequence portion
ccaccauaccuggauuccaca

SEQ ID NO: 3950 - RNA, 21 nt, Artificial Sequence
  C3-targeting RNA guide sequence portion
ccaccaugacucccacucuca

SEQ ID NO: 3951 - RNA, 21 nt, Artificial Sequence
  C3-targeting RNA guide sequence portion
ccaccccagaaccagcccugu

SEQ ID NO: 3952 - RNA, 21 nt, Artificial Sequence
  C3-targeting RNA guide sequence portion
ccaccgucucaaccacauggg

SEQ ID NO: 3953 - RNA, 21 nt, Artificial Sequence
  C3-targeting RNA guide sequence portion
ccacgauaccuggauuccaca

SEQ ID NO: 3954 - RNA, 21 nt, Artificial Sequence
  C3-targeting RNA guide sequence portion
ccacggaugugagacgccagu

SEQ ID NO: 3955 - RNA, 21 nt, Artificial Sequence
  C3-targeting RNA guide sequence portion
ccacucucagccagcugggcc

SEQ ID NO: 3956 - RNA, 21 nt, Artificial Sequence
  C3-targeting RNA guide sequence portion
ccagaaccagcccuguuugug

SEQ ID NO: 3957 - RNA, 21 nt, Artificial Sequence
  C3-targeting RNA guide sequence portion
ccagacccacaaucgccuaaa

SEQ ID NO: 3958 - RNA, 21 nt, Artificial Sequence
  C3-targeting RNA guide sequence portion
ccagagaagauaauggcauug

SEQ ID NO: 3959 - RNA, 21 nt, Artificial Sequence
  C3-targeting RNA guide sequence portion
ccagagacuuggaggaguugc

SEQ ID NO: 3960 - RNA, 21 nt, Artificial Sequence
  C3-targeting RNA guide sequence portion
ccagaggcuggggcacacagc

SEQ ID NO: 3961 - RNA, 21 nt, Artificial Sequence
  C3-targeting RNA guide sequence portion
ccagcccuguuuguggguaga

SEQ ID NO: 3962 - RNA, 21 nt, Artificial Sequence
  C3-targeting RNA guide sequence portion
ccagccuaaaccuccaacacc

SEQ ID NO: 3963 - RNA, 21 nt, Artificial Sequence
  C3-targeting RNA guide sequence portion
ccagccucugguccuggagag

SEQ ID NO: 3964 - RNA, 21 nt, Artificial Sequence
  C3-targeting RNA guide sequence portion
ccagcgucagcaacuccucca

SEQ ID NO: 3965 - RNA, 21 nt, Artificial Sequence
  C3-targeting RNA guide sequence portion
ccagcuggcugagagugggag

SEQ ID NO: 3966 - RNA, 21 nt, Artificial Sequence
  C3-targeting RNA guide sequence portion
ccagcugggccuggccuuuga

SEQ ID NO: 3967 - RNA, 21 nt, Artificial Sequence
  C3-targeting RNA guide sequence portion
ccaggaccagaggcuggggca

SEQ ID NO: 3968 - RNA, 21 nt, Artificial Sequence
  C3-targeting RNA guide sequence portion
ccaggcccagcuggcugagag

SEQ ID NO: 3969 - RNA, 21 nt, Artificial Sequence
  C3-targeting RNA guide sequence portion
ccaggcgcugacuccagugag

SEQ ID NO: 3970 - RNA, 21 nt, Artificial Sequence
  C3-targeting RNA guide sequence portion
ccaggcuuucaaaggccaggc

SEQ ID NO: 3971 - RNA, 21 nt, Artificial Sequence
  C3-targeting RNA guide sequence portion
ccagguaucauggaauuggag

SEQ ID NO: 3972 - RNA, 21 nt, Artificial Sequence
  C3-targeting RNA guide sequence portion
ccagguaucguggaauuggag

SEQ ID NO: 3973 - RNA, 21 nt, Artificial Sequence
  C3-targeting RNA guide sequence portion
ccagguaugguggaauuggag

SEQ ID NO: 3974 - RNA, 21 nt, Artificial Sequence
  C3-targeting RNA guide sequence portion
ccaggucccuguagaauucag

SEQ ID NO: 3975 - RNA, 21 nt, Artificial Sequence
  C3-targeting RNA guide sequence portion
ccaguccuaauaaauacaauc

SEQ ID NO: 3976 - RNA, 21 nt, Artificial Sequence
  C3-targeting RNA guide sequence portion
ccaguccucacuggagucagc

SEQ ID NO: 3977 - RNA, 21 nt, Artificial Sequence
  C3-targeting RNA guide sequence portion
ccagugacugccggcgcacuu

SEQ ID NO: 3978 - RNA, 21 nt, Artificial Sequence
  C3-targeting RNA guide sequence portion
ccagugaggacuggcgucuca

SEQ ID NO: 3979 - RNA, 21 nt, Artificial Sequence
  C3-targeting RNA guide sequence portion
ccauaaacacccaaacucuca

SEQ ID NO: 3980 - RNA, 21 nt, Artificial Sequence
  C3-targeting RNA guide sequence portion
ccauaccuggauuccacaaac

SEQ ID NO: 3981 - RNA, 21 nt, Artificial Sequence
  C3-targeting RNA guide sequence portion
ccaucaaugaacaccacauac

SEQ ID NO: 3982 - RNA, 21 nt, Artificial Sequence
  C3-targeting RNA guide sequence portion
ccaugacucccacucucagcc

SEQ ID NO: 3983 - RNA, 21 nt, Artificial Sequence
  C3-targeting RNA guide sequence portion
ccaugauaccuggauuccaca

SEQ ID NO: 3984 - RNA, 21 nt, Artificial Sequence
  C3-targeting RNA guide sequence portion
ccaugugguugagacgguggc

SEQ ID NO: 3985 - RNA, 21 nt, Artificial Sequence
  C3-targeting RNA guide sequence portion
ccauuaucuucucugggcacu

SEQ ID NO: 3986 - RNA, 21 nt, Artificial Sequence
  C3-targeting RNA guide sequence portion
cccaaacccacauacgccaaa

SEQ ID NO: 3987 - RNA, 21 nt, Artificial Sequence
  C3-targeting RNA guide sequence portion
cccaaacccagccuaaaccuc

SEQ ID NO: 3988 - RNA, 21 nt, Artificial Sequence
  C3-targeting RNA guide sequence portion
cccaaacccuaaaccucuacc

SEQ ID NO: 3989 - RNA, 21 nt, Artificial Sequence
  C3-targeting RNA guide sequence portion
cccaaacucacaggcagccca

SEQ ID NO: 3990 - RNA, 21 nt, Artificial Sequence
  C3-targeting RNA guide sequence portion
cccaaacuccaauuccaccau

SEQ ID NO: 3991 - RNA, 21 nt, Artificial Sequence
  C3-targeting RNA guide sequence portion
cccaaacucucaggcagccca

SEQ ID NO: 3992 - RNA, 21 nt, Artificial Sequence
  C3-targeting RNA guide sequence portion
cccaaauauauauaaucauuc

SEQ ID NO: 3993 - RNA, 21 nt, Artificial Sequence
  C3-targeting RNA guide sequence portion
cccaaaucuuguaaaguccaa

SEQ ID NO: 3994 - RNA, 21 nt, Artificial Sequence
  C3-targeting RNA guide sequence portion
cccaaaugcacccugaauucu

SEQ ID NO: 3995 - RNA, 21 nt, Artificial Sequence
  C3-targeting RNA guide sequence portion
cccaaaugucugcuuccaccc

SEQ ID NO: 3996 - RNA, 21 nt, Artificial Sequence
  C3-targeting RNA guide sequence portion
cccaacccauaaacacccaaa

SEQ ID NO: 3997 - RNA, 21 nt, Artificial Sequence
  C3-targeting RNA guide sequence portion
cccaaccgcaccaucaaugaa

SEQ ID NO: 3998 - RNA, 21 nt, Artificial Sequence
  C3-targeting RNA guide sequence portion
cccaaccugcuaaccccugaa

SEQ ID NO: 3999 - RNA, 21 nt, Artificial Sequence
  C3-targeting RNA guide sequence portion
cccaacuauacaugaacccga

SEQ ID NO: 4000 - RNA, 21 nt, Artificial Sequence
  C3-targeting RNA guide sequence portion
cccaagcugcaaacucccaaa

SEQ ID NO: 4001 - RNA, 21 nt, Artificial Sequence
  C3-targeting RNA guide sequence portion
cccacaaacagggcugguucu

SEQ ID NO: 4002 - RNA, 21 nt, Artificial Sequence
  C3-targeting RNA guide sequence portion
cccacaaucgccuaaacccac

SEQ ID NO: 4003 - RNA, 21 nt, Artificial Sequence
  C3-targeting RNA guide sequence portion
cccacacaugccccaaacccu

SEQ ID NO: 4004 - RNA, 21 nt, Artificial Sequence
  C3-targeting RNA guide sequence portion
cccacacugaaaauugcaagu

SEQ ID NO: 4005 - RNA, 21 nt, Artificial Sequence
  C3-targeting RNA guide sequence portion
cccacauacgccaaaaccucu

SEQ ID NO: 4006 - RNA, 21 nt, Artificial Sequence
  C3-targeting RNA guide sequence portion
cccaccaaacccugaaccuuc

SEQ ID NO: 4007 - RNA, 21 nt, Artificial Sequence
  C3-targeting RNA guide sequence portion
cccacucucagccagcugggc

SEQ ID NO: 4008 - RNA, 21 nt, Artificial Sequence
  C3-targeting RNA guide sequence portion
cccagaaccagcccuguuugu

SEQ ID NO: 4009 - RNA, 21 nt, Artificial Sequence
  C3-targeting RNA guide sequence portion
cccagagaagauaauggcauu

SEQ ID NO: 4010 - RNA, 21 nt, Artificial Sequence
  C3-targeting RNA guide sequence portion
cccagccuaaaccuccaacac

SEQ ID NO: 4011 - RNA, 21 nt, Artificial Sequence
  C3-targeting RNA guide sequence portion
cccagccucugguccuggaga

SEQ ID NO: 4012 - RNA, 21 nt, Artificial Sequence
  C3-targeting RNA guide sequence portion
cccagcuggcugagaguggga

SEQ ID NO: 4013 - RNA, 21 nt, Artificial Sequence
  C3-targeting RNA guide sequence portion
cccaggcuuucaaaggccagg

SEQ ID NO: 4014 - RNA, 21 nt, Artificial Sequence
  C3-targeting RNA guide sequence portion
cccaguccuaauaaauacaau

SEQ ID NO: 4015 - RNA, 21 nt, Artificial Sequence
  C3-targeting RNA guide sequence portion
cccauaaacacccaaacucuc

SEQ ID NO: 4016 - RNA, 21 nt, Artificial Sequence
  C3-targeting RNA guide sequence portion
cccaugugguugagacggugg

SEQ ID NO: 4017 - RNA, 21 nt, Artificial Sequence
  C3-targeting RNA guide sequence portion
ccccaaacccagccuaaaccu

SEQ ID NO: 4018 - RNA, 21 nt, Artificial Sequence
  C3-targeting RNA guide sequence portion
ccccaaacccuaaaccucuac

SEQ ID NO: 4019 - RNA, 21 nt, Artificial Sequence
  C3-targeting RNA guide sequence portion
ccccaaaugucugcuuccacc

SEQ ID NO: 4020 - RNA, 21 nt, Artificial Sequence
  C3-targeting RNA guide sequence portion
ccccaaccgcaccaucaauga

SEQ ID NO: 4021 - RNA, 21 nt, Artificial Sequence
  C3-targeting RNA guide sequence portion
ccccaacuauacaugaacccg

SEQ ID NO: 4022 - RNA, 21 nt, Artificial Sequence
  C3-targeting RNA guide sequence portion
ccccaagcugcaaacucccaa

SEQ ID NO: 4023 - RNA, 21 nt, Artificial Sequence
  C3-targeting RNA guide sequence portion
ccccagaaccagcccuguuug

SEQ ID NO: 4024 - RNA, 21 nt, Artificial Sequence
  C3-targeting RNA guide sequence portion
ccccagccucugguccuggag

SEQ ID NO: 4025 - RNA, 21 nt, Artificial Sequence
  C3-targeting RNA guide sequence portion
ccccaguccuaauaaauacaa

SEQ ID NO: 4026 - RNA, 21 nt, Artificial Sequence
  C3-targeting RNA guide sequence portion
cccccaaaugucugcuuccac

SEQ ID NO: 4027 - RNA, 21 nt, Artificial Sequence
  C3-targeting RNA guide sequence portion
cccccaaccgcaccaucaaug

SEQ ID NO: 4028 - RNA, 21 nt, Artificial Sequence
  C3-targeting RNA guide sequence portion
cccccucguugcccaggcuuu

SEQ ID NO: 4029 - RNA, 21 nt, Artificial Sequence
  C3-targeting RNA guide sequence portion
ccccucguugcccaggcuuuc

SEQ ID NO: 4030 - RNA, 21 nt, Artificial Sequence
  C3-targeting RNA guide sequence portion
ccccugaauccacaaacaccc

SEQ ID NO: 4031 - RNA, 21 nt, Artificial Sequence
  C3-targeting RNA guide sequence portion
cccgaaguagccaaucuuuaa

SEQ ID NO: 4032 - RNA, 21 nt, Artificial Sequence
  C3-targeting RNA guide sequence portion
cccggacacccucaacucuac

SEQ ID NO: 4033 - RNA, 21 nt, Artificial Sequence
  C3-targeting RNA guide sequence portion
cccuaaaccaacagaugaccu

SEQ ID NO: 4034 - RNA, 21 nt, Artificial Sequence
  C3-targeting RNA guide sequence portion
cccuaaaccucuaccucucua

SEQ ID NO: 4035 - RNA, 21 nt, Artificial Sequence
  C3-targeting RNA guide sequence portion
cccucaacucuaccuacccaa

SEQ ID NO: 4036 - RNA, 21 nt, Artificial Sequence
  C3-targeting RNA guide sequence portion
cccucguugcccaggcuuuca

SEQ ID NO: 4037 - RNA, 21 nt, Artificial Sequence
  C3-targeting RNA guide sequence portion
cccugaaccuuccaaccagcg

SEQ ID NO: 4038 - RNA, 21 nt, Artificial Sequence
  C3-targeting RNA guide sequence portion
cccugaauccacaaacaccca

SEQ ID NO: 4039 - RNA, 21 nt, Artificial Sequence
  C3-targeting RNA guide sequence portion
cccugaauucuacagggaccu

SEQ ID NO: 4040 - RNA, 21 nt, Artificial Sequence
  C3-targeting RNA guide sequence portion
cccuguagaauucagggugca

SEQ ID NO: 4041 - RNA, 21 nt, Artificial Sequence
  C3-targeting RNA guide sequence portion
cccuguuuguggguagaguca

SEQ ID NO: 4042 - RNA, 21 nt, Artificial Sequence
  C3-targeting RNA guide sequence portion
ccgaaguagccaaucuuuaaa

SEQ ID NO: 4043 - RNA, 21 nt, Artificial Sequence
  C3-targeting RNA guide sequence portion
ccgcaccaucaaugaacacca

SEQ ID NO: 4044 - RNA, 21 nt, Artificial Sequence
  C3-targeting RNA guide sequence portion
ccggacacccucaacucuacc

SEQ ID NO: 4045 - RNA, 21 nt, Artificial Sequence
  C3-targeting RNA guide sequence portion
ccggcagucacuggauccucu

SEQ ID NO: 4046 - RNA, 21 nt, Artificial Sequence
  C3-targeting RNA guide sequence portion
ccggcgcacuugccaaugcca

SEQ ID NO: 4047 - RNA, 21 nt, Artificial Sequence
  C3-targeting RNA guide sequence portion
ccgggaguuugaguguuuaca

SEQ ID NO: 4048 - RNA, 21 nt, Artificial Sequence
  C3-targeting RNA guide sequence portion
ccgucucaaccacaugggcag

SEQ ID NO: 4049 - RNA, 21 nt, Artificial Sequence
  C3-targeting RNA guide sequence portion
ccguggaaugacaagcccacu

SEQ ID NO: 4050 - RNA, 21 nt, Artificial Sequence
  C3-targeting RNA guide sequence portion
ccuaaaccaacagaugaccuc

SEQ ID NO: 4051 - RNA, 21 nt, Artificial Sequence
  C3-targeting RNA guide sequence portion
ccuaaacccacacaugcccca

SEQ ID NO: 4052 - RNA, 21 nt, Artificial Sequence
  C3-targeting RNA guide sequence portion
ccuaaaccuccaacaccccag

SEQ ID NO: 4053 - RNA, 21 nt, Artificial Sequence
  C3-targeting RNA guide sequence portion
ccuaaaccucuaccucucuaa

SEQ ID NO: 4054 - RNA, 21 nt, Artificial Sequence
  C3-targeting RNA guide sequence portion
ccuacccaaacccacauacgc

SEQ ID NO: 4055 - RNA, 21 nt, Artificial Sequence
  C3-targeting RNA guide sequence portion
ccucaaaucuuagagcacccc

SEQ ID NO: 4056 - RNA, 21 nt, Artificial Sequence
  C3-targeting RNA guide sequence portion
ccucaacucuaccuacccaaa

SEQ ID NO: 4057 - RNA, 21 nt, Artificial Sequence
  C3-targeting RNA guide sequence portion
ccucaauucuagaaacauccc

SEQ ID NO: 4058 - RNA, 21 nt, Artificial Sequence
  C3-targeting RNA guide sequence portion
ccucacuggagucagcgccug

SEQ ID NO: 4059 - RNA, 21 nt, Artificial Sequence
  C3-targeting RNA guide sequence portion
ccuccaacaccccaguccuaa

SEQ ID NO: 4060 - RNA, 21 nt, Artificial Sequence
  C3-targeting RNA guide sequence portion
ccuccaagucucuggacuucc

SEQ ID NO: 4061 - RNA, 21 nt, Artificial Sequence
  C3-targeting RNA guide sequence portion
ccucguugcccaggcuuucaa

SEQ ID NO: 4062 - RNA, 21 nt, Artificial Sequence
  C3-targeting RNA guide sequence portion
ccucuaaaccucaaaucuuag

SEQ ID NO: 4063 - RNA, 21 nt, Artificial Sequence
  C3-targeting RNA guide sequence portion
ccucuaccucucuaaacacuc

SEQ ID NO: 4064 - RNA, 21 nt, Artificial Sequence
  C3-targeting RNA guide sequence portion
ccucuccaggaccagaggcug

SEQ ID NO: 4065 - RNA, 21 nt, Artificial Sequence
  C3-targeting RNA guide sequence portion
ccucucuaaacacuccaaaua

SEQ ID NO: 4066 - RNA, 21 nt, Artificial Sequence
  C3-targeting RNA guide sequence portion
ccucugguccuggagaggauc

SEQ ID NO: 4067 - RNA, 21 nt, Artificial Sequence
  C3-targeting RNA guide sequence portion
ccugaaccuuccaaccagcgu

SEQ ID NO: 4068 - RNA, 21 nt, Artificial Sequence
  C3-targeting RNA guide sequence portion
ccugaauccacaaacacccaa

SEQ ID NO: 4069 - RNA, 21 nt, Artificial Sequence
  C3-targeting RNA guide sequence portion
ccugaauucuacagggaccug

SEQ ID NO: 4070 - RNA, 21 nt, Artificial Sequence
  C3-targeting RNA guide sequence portion
ccugagaguuuggguguuuau

SEQ ID NO: 4071 - RNA, 21 nt, Artificial Sequence
  C3-targeting RNA guide sequence portion
ccugccaggcgcugacuccag

SEQ ID NO: 4072 - RNA, 21 nt, Artificial Sequence
  C3-targeting RNA guide sequence portion
ccugcccaugugguugagacg

SEQ ID NO: 4073 - RNA, 21 nt, Artificial Sequence
  C3-targeting RNA guide sequence portion
ccugcuaaccccugaauccac

SEQ ID NO: 4074 - RNA, 21 nt, Artificial Sequence
  C3-targeting RNA guide sequence portion
ccuggacccccaaaugucugc

SEQ ID NO: 4075 - RNA, 21 nt, Artificial Sequence
  C3-targeting RNA guide sequence portion
ccuggagaggauccagugacu

SEQ ID NO: 4076 - RNA, 21 nt, Artificial Sequence
  C3-targeting RNA guide sequence portion
ccuggauuccacaaacaccca

SEQ ID NO: 4077 - RNA, 21 nt, Artificial Sequence
  C3-targeting RNA guide sequence portion
ccuggcaggcugugugcccca

SEQ ID NO: 4078 - RNA, 21 nt, Artificial Sequence
  C3-targeting RNA guide sequence portion
ccuggccuuugaaagccuggg

SEQ ID NO: 4079 - RNA, 21 nt, Artificial Sequence
  C3-targeting RNA guide sequence portion
ccugggcaacgagggggccac

SEQ ID NO: 4080 - RNA, 21 nt, Artificial Sequence
  C3-targeting RNA guide sequence portion
ccuguagaauucagggugcau

SEQ ID NO: 4081 - RNA, 21 nt, Artificial Sequence
  C3-targeting RNA guide sequence portion
ccuguuuguggguagagucau

SEQ ID NO: 4082 - RNA, 21 nt, Artificial Sequence
  C3-targeting RNA guide sequence portion
ccuuccaaccagcgucagcaa

SEQ ID NO: 4083 - RNA, 21 nt, Artificial Sequence
  C3-targeting RNA guide sequence portion
ccuuugaaagccugggcaacg

SEQ ID NO: 4084 - RNA, 21 nt, Artificial Sequence
  C3-targeting RNA guide sequence portion
cgaaguagccaaucuuuaaac

SEQ ID NO: 4085 - RNA, 21 nt, Artificial Sequence
  C3-targeting RNA guide sequence portion
cgagggggccacacaucccac

SEQ ID NO: 4086 - RNA, 21 nt, Artificial Sequence
  C3-targeting RNA guide sequence portion
cgauaccuggauuccacaaac

SEQ ID NO: 4087 - RNA, 21 nt, Artificial Sequence
  C3-targeting RNA guide sequence portion
cgauugugggucuggaagucc

SEQ ID NO: 4088 - RNA, 21 nt, Artificial Sequence
  C3-targeting RNA guide sequence portion
cgcaccaucaaugaacaccac

SEQ ID NO: 4089 - RNA, 21 nt, Artificial Sequence
  C3-targeting RNA guide sequence portion
cgcacuugccaaugccauuau

SEQ ID NO: 4090 - RNA, 21 nt, Artificial Sequence
  C3-targeting RNA guide sequence portion
cgccaaaaccucuaaaccuca

SEQ ID NO: 4091 - RNA, 21 nt, Artificial Sequence
  C3-targeting RNA guide sequence portion
cgccaguccucacuggaguca

SEQ ID NO: 4092 - RNA, 21 nt, Artificial Sequence
  C3-targeting RNA guide sequence portion
cgccggcagucacuggauccu

SEQ ID NO: 4093 - RNA, 21 nt, Artificial Sequence
  C3-targeting RNA guide sequence portion
cgccuaaacccacacaugccc

SEQ ID NO: 4094 - RNA, 21 nt, Artificial Sequence
  C3-targeting RNA guide sequence portion
cgccuggcaggcugugugccc

SEQ ID NO: 4095 - RNA, 21 nt, Artificial Sequence
  C3-targeting RNA guide sequence portion
cgcugacuccagugaggacug

SEQ ID NO: 4096 - RNA, 21 nt, Artificial Sequence
  C3-targeting RNA guide sequence portion
cgcugguuggaagguucaggg

SEQ ID NO: 4097 - RNA, 21 nt, Artificial Sequence
  C3-targeting RNA guide sequence portion
cggacacccucaacucuaccu

SEQ ID NO: 4098 - RNA, 21 nt, Artificial Sequence
  C3-targeting RNA guide sequence portion
cggagguuuggacuuuacaag

SEQ ID NO: 4099 - RNA, 21 nt, Artificial Sequence
  C3-targeting RNA guide sequence portion
cggaguggggcacgggagugg

SEQ ID NO: 4100 - RNA, 21 nt, Artificial Sequence
  C3-targeting RNA guide sequence portion
cggaugugagacgccaguccu

SEQ ID NO: 4101 - RNA, 21 nt, Artificial Sequence
  C3-targeting RNA guide sequence portion
cggcagucacuggauccucuc

SEQ ID NO: 4102 - RNA, 21 nt, Artificial Sequence
  C3-targeting RNA guide sequence portion
cggcgcacuugccaaugccau

SEQ ID NO: 4103 - RNA, 21 nt, Artificial Sequence
  C3-targeting RNA guide sequence portion
cgggagugggcuugucauucc

SEQ ID NO: 4104 - RNA, 21 nt, Artificial Sequence
  C3-targeting RNA guide sequence portion
cgggaguuugaguguuuacau

SEQ ID NO: 4105 - RNA, 21 nt, Artificial Sequence
  C3-targeting RNA guide sequence portion
cggguucauguauaguugggg

SEQ ID NO: 4106 - RNA, 21 nt, Artificial Sequence
  C3-targeting RNA guide sequence portion
cgguggcagugcccagagaag

SEQ ID NO: 4107 - RNA, 21 nt, Artificial Sequence
  C3-targeting RNA guide sequence portion
cguauguggguuuggguaggu

SEQ ID NO: 4108 - RNA, 21 nt, Artificial Sequence
  C3-targeting RNA guide sequence portion
cgucagcaacuccuccaaguc

SEQ ID NO: 4109 - RNA, 21 nt, Artificial Sequence
  C3-targeting RNA guide sequence portion
cgucucaaccacaugggcagg

SEQ ID NO: 4110 - RNA, 21 nt, Artificial Sequence
  C3-targeting RNA guide sequence portion
cgucucacauccguggaauga

SEQ ID NO: 4111 - RNA, 21 nt, Artificial Sequence
  C3-targeting RNA guide sequence portion
cguggaaugacaagcccacuc

SEQ ID NO: 4112 - RNA, 21 nt, Artificial Sequence
  C3-targeting RNA guide sequence portion
cguggaauuggaguuuauaua

SEQ ID NO: 4113 - RNA, 21 nt, Artificial Sequence
  C3-targeting RNA guide sequence portion
cguugcccaggcuuucaaagg

SEQ ID NO: 4114 - RNA, 21 nt, Artificial Sequence
  C3-targeting RNA guide sequence portion
cuaaacacuccaaauauguaa

SEQ ID NO: 4115 - RNA, 21 nt, Artificial Sequence
  C3-targeting RNA guide sequence portion
cuaaaccaacagaugaccuca

SEQ ID NO: 4116 - RNA, 21 nt, Artificial Sequence
  C3-targeting RNA guide sequence portion
cuaaacccacacaugccccaa

SEQ ID NO: 4117 - RNA, 21 nt, Artificial Sequence
  C3-targeting RNA guide sequence portion
cuaaaccucaaaucuuagagc

SEQ ID NO: 4118 - RNA, 21 nt, Artificial Sequence
  C3-targeting RNA guide sequence portion
cuaaaccuccaacaccccagu

SEQ ID NO: 4119 - RNA, 21 nt, Artificial Sequence
  C3-targeting RNA guide sequence portion
cuaaaccucuaccucucuaaa

SEQ ID NO: 4120 - RNA, 21 nt, Artificial Sequence
  C3-targeting RNA guide sequence portion
cuaaccccugaauccacaaac

SEQ ID NO: 4121 - RNA, 21 nt, Artificial Sequence
  C3-targeting RNA guide sequence portion
cuaagauuugagguuuagagg

SEQ ID NO: 4122 - RNA, 21 nt, Artificial Sequence
  C3-targeting RNA guide sequence portion
cuacagggaccuggaccccca

SEQ ID NO: 4123 - RNA, 21 nt, Artificial Sequence
  C3-targeting RNA guide sequence portion
cuacccaaacccacauacgcc

SEQ ID NO: 4124 - RNA, 21 nt, Artificial Sequence
  C3-targeting RNA guide sequence portion
cuacccacaaacagggcuggu

SEQ ID NO: 4125 - RNA, 21 nt, Artificial Sequence
  C3-targeting RNA guide sequence portion
cuaccuacccaaacccacaua

SEQ ID NO: 4126 - RNA, 21 nt, Artificial Sequence
  C3-targeting RNA guide sequence portion
cuaccucucuaaacacuccaa

SEQ ID NO: 4127 - RNA, 21 nt, Artificial Sequence
  C3-targeting RNA guide sequence portion
cuacuucggguucauguauag

SEQ ID NO: 4128 - RNA, 21 nt, Artificial Sequence
  C3-targeting RNA guide sequence portion
cuagaaacaucccaaacucca

SEQ ID NO: 4129 - RNA, 21 nt, Artificial Sequence
  C3-targeting RNA guide sequence portion
cuagaauugaggucaucuguu

SEQ ID NO: 4130 - RNA, 21 nt, Artificial Sequence
  C3-targeting RNA guide sequence portion
cuauacaugaacccgaaguag

SEQ ID NO: 4131 - RNA, 21 nt, Artificial Sequence
  C3-targeting RNA guide sequence portion
cucaaacucccggacacccuc

SEQ ID NO: 4132 - RNA, 21 nt, Artificial Sequence
  C3-targeting RNA guide sequence portion
cucaaaucuuagagcacccca

SEQ ID NO: 4133 - RNA, 21 nt, Artificial Sequence
  C3-targeting RNA guide sequence portion
cucaaccacaugggcaggaca

SEQ ID NO: 4134 - RNA, 21 nt, Artificial Sequence
  C3-targeting RNA guide sequence portion
cucaacucuaccuacccaaac

SEQ ID NO: 4135 - RNA, 21 nt, Artificial Sequence
  C3-targeting RNA guide sequence portion
cucaauucuagaaacauccca

SEQ ID NO: 4136 - RNA, 21 nt, Artificial Sequence
  C3-targeting RNA guide sequence portion
cucacaggcagcccaaauaua

SEQ ID NO: 4137 - RNA, 21 nt, Artificial Sequence
  C3-targeting RNA guide sequence portion
cucacaggcagcccaaaugua

SEQ ID NO: 4138 - RNA, 21 nt, Artificial Sequence
  C3-targeting RNA guide sequence portion
cucacauccguggaaugacaa

SEQ ID NO: 4139 - RNA, 21 nt, Artificial Sequence
  C3-targeting RNA guide sequence portion
cucacuggagucagcgccugg

SEQ ID NO: 4140 - RNA, 21 nt, Artificial Sequence
  C3-targeting RNA guide sequence portion
cucagccagcugggccuggcc

SEQ ID NO: 4141 - RNA, 21 nt, Artificial Sequence
  C3-targeting RNA guide sequence portion
cucaggcagcccaaauguaua

SEQ ID NO: 4142 - RNA, 21 nt, Artificial Sequence
  C3-targeting RNA guide sequence portion
cuccaaauauguaaacacuca

SEQ ID NO: 4143 - RNA, 21 nt, Artificial Sequence
  C3-targeting RNA guide sequence portion
cuccaacaccccaguccuaau

SEQ ID NO: 4144 - RNA, 21 nt, Artificial Sequence
  C3-targeting RNA guide sequence portion
cuccaagucucuggacuucca

SEQ ID NO: 4145 - RNA, 21 nt, Artificial Sequence
  C3-targeting RNA guide sequence portion
cuccaauuccaccauaccugg

SEQ ID NO: 4146 - RNA, 21 nt, Artificial Sequence
  C3-targeting RNA guide sequence portion
cuccaauuccacgauaccugg

SEQ ID NO: 4147 - RNA, 21 nt, Artificial Sequence
  C3-targeting RNA guide sequence portion
cuccaauuccaugauaccugg

SEQ ID NO: 4148 - RNA, 21 nt, Artificial Sequence
  C3-targeting RNA guide sequence portion
cuccaggaccagaggcugggg

SEQ ID NO: 4149 - RNA, 21 nt, Artificial Sequence
  C3-targeting RNA guide sequence portion
cuccagugaggacuggcgucu

SEQ ID NO: 4150 - RNA, 21 nt, Artificial Sequence
  C3-targeting RNA guide sequence portion
cucccaaaucuuguaaagucc

SEQ ID NO: 4151 - RNA, 21 nt, Artificial Sequence
  C3-targeting RNA guide sequence portion
cucccacucucagccagcugg

SEQ ID NO: 4152 - RNA, 21 nt, Artificial Sequence
  C3-targeting RNA guide sequence portion
cucccggacacccucaacucu

SEQ ID NO: 4153 - RNA, 21 nt, Artificial Sequence
  C3-targeting RNA guide sequence portion
cuccuccaagucucuggacuu

SEQ ID NO: 4154 - RNA, 21 nt, Artificial Sequence
  C3-targeting RNA guide sequence portion
cucggagguuuggacuuuaca

SEQ ID NO: 4155 - RNA, 21 nt, Artificial Sequence
  C3-targeting RNA guide sequence portion
cucguugcccaggcuuucaaa

SEQ ID NO: 4156 - RNA, 21 nt, Artificial Sequence
  C3-targeting RNA guide sequence portion
cucuaaacacuccaaauaugu

SEQ ID NO: 4157 - RNA, 21 nt, Artificial Sequence
  C3-targeting RNA guide sequence portion
cucuaaaccucaaaucuuaga

SEQ ID NO: 4158 - RNA, 21 nt, Artificial Sequence
  C3-targeting RNA guide sequence portion
cucuaagauuugagguuuaga

SEQ ID NO: 4159 - RNA, 21 nt, Artificial Sequence
  C3-targeting RNA guide sequence portion
cucuacccacaaacagggcug

SEQ ID NO: 4160 - RNA, 21 nt, Artificial Sequence
  C3-targeting RNA guide sequence portion
cucuaccuacccaaacccaca

SEQ ID NO: 4161 - RNA, 21 nt, Artificial Sequence
  C3-targeting RNA guide sequence portion
cucuaccucucuaaacacucc

SEQ ID NO: 4162 - RNA, 21 nt, Artificial Sequence
  C3-targeting RNA guide sequence portion
cucucagccagcugggccugg

SEQ ID NO: 4163 - RNA, 21 nt, Artificial Sequence
  C3-targeting RNA guide sequence portion
cucucaggcagcccaaaugua

SEQ ID NO: 4164 - RNA, 21 nt, Artificial Sequence
  C3-targeting RNA guide sequence portion
cucuccaggaccagaggcugg

SEQ ID NO: 4165 - RNA, 21 nt, Artificial Sequence
  C3-targeting RNA guide sequence portion
cucucuaaacacuccaaauau

SEQ ID NO: 4166 - RNA, 21 nt, Artificial Sequence
  C3-targeting RNA guide sequence portion
cucuggacuuccagacccaca

SEQ ID NO: 4167 - RNA, 21 nt, Artificial Sequence
  C3-targeting RNA guide sequence portion
cucugggcacugccaccgucu

SEQ ID NO: 4168 - RNA, 21 nt, Artificial Sequence
  C3-targeting RNA guide sequence portion
cucugguccuggagaggaucc

SEQ ID NO: 4169 - RNA, 21 nt, Artificial Sequence
  C3-targeting RNA guide sequence portion
cugaaaauugcaaguccccaa

SEQ ID NO: 4170 - RNA, 21 nt, Artificial Sequence
  C3-targeting RNA guide sequence portion
cugaaccuuccaaccagcguc

SEQ ID NO: 4171 - RNA, 21 nt, Artificial Sequence
  C3-targeting RNA guide sequence portion
cugaauccacaaacacccaaa

SEQ ID NO: 4172 - RNA, 21 nt, Artificial Sequence
  C3-targeting RNA guide sequence portion
cugaauucuacagggaccugg

SEQ ID NO: 4173 - RNA, 21 nt, Artificial Sequence
  C3-targeting RNA guide sequence portion
cugacgcugguuggaagguuc

SEQ ID NO: 4174 - RNA, 21 nt, Artificial Sequence
  C3-targeting RNA guide sequence portion
cugacuccagugaggacuggc

SEQ ID NO: 4175 - RNA, 21 nt, Artificial Sequence
  C3-targeting RNA guide sequence portion
cugagagugggagucauggug

SEQ ID NO: 4176 - RNA, 21 nt, Artificial Sequence
  C3-targeting RNA guide sequence portion
cugagaguuuggguguuuaug

SEQ ID NO: 4177 - RNA, 21 nt, Artificial Sequence
  C3-targeting RNA guide sequence portion
cugcaaacucccaaaucuugu

SEQ ID NO: 4178 - RNA, 21 nt, Artificial Sequence
  C3-targeting RNA guide sequence portion
cugccaccgucucaaccacau

SEQ ID NO: 4179 - RNA, 21 nt, Artificial Sequence
  C3-targeting RNA guide sequence portion
cugccaggcgcugacuccagu

SEQ ID NO: 4180 - RNA, 21 nt, Artificial Sequence
  C3-targeting RNA guide sequence portion
cugcccaugugguugagacgg

SEQ ID NO: 4181 - RNA, 21 nt, Artificial Sequence
  C3-targeting RNA guide sequence portion
cugccggcgcacuugccaaug

SEQ ID NO: 4182 - RNA, 21 nt, Artificial Sequence
  C3-targeting RNA guide sequence portion
cugccugagaguuuggguguu

SEQ ID NO: 4183 - RNA, 21 nt, Artificial Sequence
  C3-targeting RNA guide sequence portion
cugcuaaccccugaauccaca

SEQ ID NO: 4184 - RNA, 21 nt, Artificial Sequence
  C3-targeting RNA guide sequence portion
cugcuguccugcccauguggu

SEQ ID NO: 4185 - RNA, 21 nt, Artificial Sequence
  C3-targeting RNA guide sequence portion
cugcuuccaccccagaaccag

SEQ ID NO: 4186 - RNA, 21 nt, Artificial Sequence
  C3-targeting RNA guide sequence portion
cuggaaguccagagacuugga

SEQ ID NO: 4187 - RNA, 21 nt, Artificial Sequence
  C3-targeting RNA guide sequence portion
cuggacccccaaaugucugcu

SEQ ID NO: 4188 - RNA, 21 nt, Artificial Sequence
  C3-targeting RNA guide sequence portion
cuggacuuccagacccacaau

SEQ ID NO: 4189 - RNA, 21 nt, Artificial Sequence
  C3-targeting RNA guide sequence portion
cuggagaggauccagugacug

SEQ ID NO: 4190 - RNA, 21 nt, Artificial Sequence
  C3-targeting RNA guide sequence portion
cuggagucagcgccuggcagg

SEQ ID NO: 4191 - RNA, 21 nt, Artificial Sequence
  C3-targeting RNA guide sequence portion
cuggauccucuccaggaccag

SEQ ID NO: 4192 - RNA, 21 nt, Artificial Sequence
  C3-targeting RNA guide sequence portion
cuggauuccacaaacacccaa

SEQ ID NO: 4193 - RNA, 21 nt, Artificial Sequence
  C3-targeting RNA guide sequence portion
cuggcaggcugugugccccag

SEQ ID NO: 4194 - RNA, 21 nt, Artificial Sequence
  C3-targeting RNA guide sequence portion
cuggccuuugaaagccugggc

SEQ ID NO: 4195 - RNA, 21 nt, Artificial Sequence
  C3-targeting RNA guide sequence portion
cuggcgucucacauccgugga

SEQ ID NO: 4196 - RNA, 21 nt, Artificial Sequence
  C3-targeting RNA guide sequence portion
cuggcugagagugggagucau

SEQ ID NO: 4197 - RNA, 21 nt, Artificial Sequence
  C3-targeting RNA guide sequence portion
cugggcaacgagggggccaca

SEQ ID NO: 4198 - RNA, 21 nt, Artificial Sequence
  C3-targeting RNA guide sequence portion
cugggcacugccaccgucuca

SEQ ID NO: 4199 - RNA, 21 nt, Artificial Sequence
  C3-targeting RNA guide sequence portion
cugggccuggccuuugaaagc

SEQ ID NO: 4200 - RNA, 21 nt, Artificial Sequence
  C3-targeting RNA guide sequence portion
cuggggcacacagccugccag

SEQ ID NO: 4201 - RNA, 21 nt, Artificial Sequence
  C3-targeting RNA guide sequence portion
cugggguggaagcagacauuu

SEQ ID NO: 4202 - RNA, 21 nt, Artificial Sequence
  C3-targeting RNA guide sequence portion
cugggguguuggagguuuagg

SEQ ID NO: 4203 - RNA, 21 nt, Artificial Sequence
  C3-targeting RNA guide sequence portion
cuggguuuggggugcucuaag

SEQ ID NO: 4204 - RNA, 21 nt, Artificial Sequence
  C3-targeting RNA guide sequence portion
cugguccuggagaggauccag

SEQ ID NO: 4205 - RNA, 21 nt, Artificial Sequence
  C3-targeting RNA guide sequence portion
cugguucugggguggaagcag

SEQ ID NO: 4206 - RNA, 21 nt, Artificial Sequence
  C3-targeting RNA guide sequence portion
cugguuggaagguucaggguu

SEQ ID NO: 4207 - RNA, 21 nt, Artificial Sequence
  C3-targeting RNA guide sequence portion
cuguagaauucagggugcauu

SEQ ID NO: 4208 - RNA, 21 nt, Artificial Sequence
  C3-targeting RNA guide sequence portion
cuguccugcccaugugguuga

SEQ ID NO: 4209 - RNA, 21 nt, Artificial Sequence
  C3-targeting RNA guide sequence portion
cugucggaguggggcacggga

SEQ ID NO: 4210 - RNA, 21 nt, Artificial Sequence
  C3-targeting RNA guide sequence portion
cugugugccccagccucuggu

SEQ ID NO: 4211 - RNA, 21 nt, Artificial Sequence
  C3-targeting RNA guide sequence portion
cuguugguuuaggguguaugu

SEQ ID NO: 4212 - RNA, 21 nt, Artificial Sequence
  C3-targeting RNA guide sequence portion
cuguuuguggguagagucaua

SEQ ID NO: 4213 - RNA, 21 nt, Artificial Sequence
  C3-targeting RNA guide sequence portion
cuuagagcaccccaaacccag

SEQ ID NO: 4214 - RNA, 21 nt, Artificial Sequence
  C3-targeting RNA guide sequence portion
cuuccaaccagcgucagcaac

SEQ ID NO: 4215 - RNA, 21 nt, Artificial Sequence
  C3-targeting RNA guide sequence portion
cuuccaccccagaaccagccc

SEQ ID NO: 4216 - RNA, 21 nt, Artificial Sequence
  C3-targeting RNA guide sequence portion
cuuccagacccacaaucgccu

SEQ ID NO: 4217 - RNA, 21 nt, Artificial Sequence
  C3-targeting RNA guide sequence portion
cuucggguucauguauaguug

SEQ ID NO: 4218 - RNA, 21 nt, Artificial Sequence
  C3-targeting RNA guide sequence portion
cuucucugggcacugccaccg

SEQ ID NO: 4219 - RNA, 21 nt, Artificial Sequence
  C3-targeting RNA guide sequence portion
cuugcaauuuucagugugggu

SEQ ID NO: 4220 - RNA, 21 nt, Artificial Sequence
  C3-targeting RNA guide sequence portion
cuugccaaugccauuaucuuc

SEQ ID NO: 4221 - RNA, 21 nt, Artificial Sequence
  C3-targeting RNA guide sequence portion
cuuggaggaguugcugacgcu

SEQ ID NO: 4222 - RNA, 21 nt, Artificial Sequence
  C3-targeting RNA guide sequence portion
cuuggggacuugcaauuuuca

SEQ ID NO: 4223 - RNA, 21 nt, Artificial Sequence
  C3-targeting RNA guide sequence portion
cuuguaaaguccaaaccuccg

SEQ ID NO: 4224 - RNA, 21 nt, Artificial Sequence
  C3-targeting RNA guide sequence portion
cuugucauuccacggauguga

SEQ ID NO: 4225 - RNA, 21 nt, Artificial Sequence
  C3-targeting RNA guide sequence portion
cuuuaaacccacacugaaaau

SEQ ID NO: 4226 - RNA, 21 nt, Artificial Sequence
  C3-targeting RNA guide sequence portion
cuuuacaagauuugggaguuu

SEQ ID NO: 4227 - RNA, 21 nt, Artificial Sequence
  C3-targeting RNA guide sequence portion
cuuucaaaggccaggcccagc

SEQ ID NO: 4228 - RNA, 21 nt, Artificial Sequence
  C3-targeting RNA guide sequence portion
cuuugaaagccugggcaacga

SEQ ID NO: 4229 - RNA, 21 nt, Artificial Sequence
  C3-targeting RNA guide sequence portion
gaaaauugcaaguccccaagc

SEQ ID NO: 4230 - RNA, 21 nt, Artificial Sequence
  C3-targeting RNA guide sequence portion
gaaacaucccaaacuccaauu

SEQ ID NO: 4231 - RNA, 21 nt, Artificial Sequence
  C3-targeting RNA guide sequence portion
gaaagccugggcaacgagggg

SEQ ID NO: 4232 - RNA, 21 nt, Artificial Sequence
  C3-targeting RNA guide sequence portion
gaacaccacauacacccuaaa

SEQ ID NO: 4233 - RNA, 21 nt, Artificial Sequence
  C3-targeting RNA guide sequence portion
gaaccagcccuguuugugggu

SEQ ID NO: 4234 - RNA, 21 nt, Artificial Sequence
  C3-targeting RNA guide sequence portion
gaacccgaaguagccaaucuu

SEQ ID NO: 4235 - RNA, 21 nt, Artificial Sequence
  C3-targeting RNA guide sequence portion
gaaccuuccaaccagcgucag

SEQ ID NO: 4236 - RNA, 21 nt, Artificial Sequence
  C3-targeting RNA guide sequence portion
gaagauaauggcauuggcaag

SEQ ID NO: 4237 - RNA, 21 nt, Artificial Sequence
  C3-targeting RNA guide sequence portion
gaagcagacauuugggggucc

SEQ ID NO: 4238 - RNA, 21 nt, Artificial Sequence
  C3-targeting RNA guide sequence portion
gaagguucaggguuugguggg

SEQ ID NO: 4239 - RNA, 21 nt, Artificial Sequence
  C3-targeting RNA guide sequence portion
gaaguagccaaucuuuaaacc

SEQ ID NO: 4240 - RNA, 21 nt, Artificial Sequence
  C3-targeting RNA guide sequence portion
gaaguccagagacuuggagga

SEQ ID NO: 4241 - RNA, 21 nt, Artificial Sequence
  C3-targeting RNA guide sequence portion
gaauccacaaacacccaaaug

SEQ ID NO: 4242 - RNA, 21 nt, Artificial Sequence
  C3-targeting RNA guide sequence portion
gaauccagguaucauggaauu

SEQ ID NO: 4243 - RNA, 21 nt, Artificial Sequence
  C3-targeting RNA guide sequence portion
gaauccagguaucguggaauu

SEQ ID NO: 4244 - RNA, 21 nt, Artificial Sequence
  C3-targeting RNA guide sequence portion
gaauccagguaugguggaauu

SEQ ID NO: 4245 - RNA, 21 nt, Artificial Sequence
  C3-targeting RNA guide sequence portion
gaaugacaagcccacucccgu

SEQ ID NO: 4246 - RNA, 21 nt, Artificial Sequence
  C3-targeting RNA guide sequence portion
gaaugauuauauauauuuggg

SEQ ID NO: 4247 - RNA, 21 nt, Artificial Sequence
  C3-targeting RNA guide sequence portion
gaauucagggugcauuugggu

SEQ ID NO: 4248 - RNA, 21 nt, Artificial Sequence
  C3-targeting RNA guide sequence portion
gaauucuacagggaccuggac

SEQ ID NO: 4249 - RNA, 21 nt, Artificial Sequence
  C3-targeting RNA guide sequence portion
gaauugaggucaucuguuggu

SEQ ID NO: 4250 - RNA, 21 nt, Artificial Sequence
  C3-targeting RNA guide sequence portion
gaauugauuguauuuauuagg

SEQ ID NO: 4251 - RNA, 21 nt, Artificial Sequence
  C3-targeting RNA guide sequence portion
gaauuggaguuugggauguuu

SEQ ID NO: 4252 - RNA, 21 nt, Artificial Sequence
  C3-targeting RNA guide sequence portion
gacaagcccacucccgugccc

SEQ ID NO: 4253 - RNA, 21 nt, Artificial Sequence
  C3-targeting RNA guide sequence portion
gacacccucaacucuaccuac

SEQ ID NO: 4254 - RNA, 21 nt, Artificial Sequence
  C3-targeting RNA guide sequence portion
gacagcagccaccaugacucc

SEQ ID NO: 4255 - RNA, 21 nt, Artificial Sequence
  C3-targeting RNA guide sequence portion
gacauuuggggguccaggucc

SEQ ID NO: 4256 - RNA, 21 nt, Artificial Sequence
  C3-targeting RNA guide sequence portion
gaccagaggcuggggcacaca

SEQ ID NO: 4257 - RNA, 21 nt, Artificial Sequence
  C3-targeting RNA guide sequence portion
gacccacaaucgccuaaaccc

SEQ ID NO: 4258 - RNA, 21 nt, Artificial Sequence
  C3-targeting RNA guide sequence portion
gacccccaaaugucugcuucc

SEQ ID NO: 4259 - RNA, 21 nt, Artificial Sequence
  C3-targeting RNA guide sequence portion
gaccucaauucuagaaacauc

SEQ ID NO: 4260 - RNA, 21 nt, Artificial Sequence
  C3-targeting RNA guide sequence portion
gaccuggacccccaaaugucu

SEQ ID NO: 4261 - RNA, 21 nt, Artificial Sequence
  C3-targeting RNA guide sequence portion
gacgccaguccucacuggagu

SEQ ID NO: 4262 - RNA, 21 nt, Artificial Sequence
  C3-targeting RNA guide sequence portion
gacgcugguuggaagguucag

SEQ ID NO: 4263 - RNA, 21 nt, Artificial Sequence
  C3-targeting RNA guide sequence portion
gacgguggcagugcccagaga

SEQ ID NO: 4264 - RNA, 21 nt, Artificial Sequence
  C3-targeting RNA guide sequence portion
gacuccagugaggacuggcgu

SEQ ID NO: 4265 - RNA, 21 nt, Artificial Sequence
  C3-targeting RNA guide sequence portion
gacucccacucucagccagcu

SEQ ID NO: 4266 - RNA, 21 nt, Artificial Sequence
  C3-targeting RNA guide sequence portion
gacucggagguuuggacuuua

SEQ ID NO: 4267 - RNA, 21 nt, Artificial Sequence
  C3-targeting RNA guide sequence portion
gacucuacccacaaacagggc

SEQ ID NO: 4268 - RNA, 21 nt, Artificial Sequence
  C3-targeting RNA guide sequence portion
gacugccggcgcacuugccaa

SEQ ID NO: 4269 - RNA, 21 nt, Artificial Sequence
  C3-targeting RNA guide sequence portion
gacuggcgucucacauccgug

SEQ ID NO: 4270 - RNA, 21 nt, Artificial Sequence
  C3-targeting RNA guide sequence portion
gacugggguguuggagguuua

SEQ ID NO: 4271 - RNA, 21 nt, Artificial Sequence
  C3-targeting RNA guide sequence portion
gacuuccagacccacaaucgc

SEQ ID NO: 4272 - RNA, 21 nt, Artificial Sequence
  C3-targeting RNA guide sequence portion
gacuugcaauuuucagugugg

SEQ ID NO: 4273 - RNA, 21 nt, Artificial Sequence
  C3-targeting RNA guide sequence portion
gacuuggaggaguugcugacg

SEQ ID NO: 4274 - RNA, 21 nt, Artificial Sequence
  C3-targeting RNA guide sequence portion
gacuuuacaagauuugggagu

SEQ ID NO: 4275 - RNA, 21 nt, Artificial Sequence
  C3-targeting RNA guide sequence portion
gagaagauaauggcauuggca

SEQ ID NO: 4276 - RNA, 21 nt, Artificial Sequence
  C3-targeting RNA guide sequence portion
gagacgccaguccucacugga

SEQ ID NO: 4277 - RNA, 21 nt, Artificial Sequence
  C3-targeting RNA guide sequence portion
gagacgguggcagugcccaga

SEQ ID NO: 4278 - RNA, 21 nt, Artificial Sequence
  C3-targeting RNA guide sequence portion
gagacucggagguuuggacuu

SEQ ID NO: 4279 - RNA, 21 nt, Artificial Sequence
  C3-targeting RNA guide sequence portion
gagacuuggaggaguugcuga

SEQ ID NO: 4280 - RNA, 21 nt, Artificial Sequence
  C3-targeting RNA guide sequence portion
gagaggauccagugacugccg

SEQ ID NO: 4281 - RNA, 21 nt, Artificial Sequence
  C3-targeting RNA guide sequence portion
gagagguagagguuuaggguu

SEQ ID NO: 4282 - RNA, 21 nt, Artificial Sequence
  C3-targeting RNA guide sequence portion
gagagugggagucaugguggc

SEQ ID NO: 4283 - RNA, 21 nt, Artificial Sequence
  C3-targeting RNA guide sequence portion
gagaguuuggguguuuauggg

SEQ ID NO: 4284 - RNA, 21 nt, Artificial Sequence
  C3-targeting RNA guide sequence portion
gagcaccccaaacccagccua

SEQ ID NO: 4285 - RNA, 21 nt, Artificial Sequence
  C3-targeting RNA guide sequence portion
gaggacuggcgucucacaucc

SEQ ID NO: 4286 - RNA, 21 nt, Artificial Sequence
  C3-targeting RNA guide sequence portion
gaggaguugcugacgcugguu

SEQ ID NO: 4287 - RNA, 21 nt, Artificial Sequence
  C3-targeting RNA guide sequence portion
gaggauccagugacugccggc

SEQ ID NO: 4288 - RNA, 21 nt, Artificial Sequence
  C3-targeting RNA guide sequence portion
gaggcuggggcacacagccug

SEQ ID NO: 4289 - RNA, 21 nt, Artificial Sequence
  C3-targeting RNA guide sequence portion
gagggggccacacaucccacc

SEQ ID NO: 4290 - RNA, 21 nt, Artificial Sequence
  C3-targeting RNA guide sequence portion
gaggguguccgggaguuugag

SEQ ID NO: 4291 - RNA, 21 nt, Artificial Sequence
  C3-targeting RNA guide sequence portion
gagguagagguuuaggguuug

SEQ ID NO: 4292 - RNA, 21 nt, Artificial Sequence
  C3-targeting RNA guide sequence portion
gaggucaucuguugguuuagg

SEQ ID NO: 4293 - RNA, 21 nt, Artificial Sequence
  C3-targeting RNA guide sequence portion
gagguuuagagguuuuggcgu

SEQ ID NO: 4294 - RNA, 21 nt, Artificial Sequence
  C3-targeting RNA guide sequence portion
gagguuuaggcuggguuuggg

SEQ ID NO: 4295 - RNA, 21 nt, Artificial Sequence
  C3-targeting RNA guide sequence portion
gagguuuaggguuuggggcau

SEQ ID NO: 4296 - RNA, 21 nt, Artificial Sequence
  C3-targeting RNA guide sequence portion
gagguuuggacuuuacaagau

SEQ ID NO: 4297 - RNA, 21 nt, Artificial Sequence
  C3-targeting RNA guide sequence portion
gagguuuuggcguaugugggu

SEQ ID NO: 4298 - RNA, 21 nt, Artificial Sequence
  C3-targeting RNA guide sequence portion
gagucagcgccuggcaggcug

SEQ ID NO: 4299 - RNA, 21 nt, Artificial Sequence
  C3-targeting RNA guide sequence portion
gagucaugguggcugcugucc

SEQ ID NO: 4300 - RNA, 21 nt, Artificial Sequence
  C3-targeting RNA guide sequence portion
gagugggagucaugguggcug

SEQ ID NO: 4301 - RNA, 21 nt, Artificial Sequence
  C3-targeting RNA guide sequence portion
gagugggcuugucauuccacg

SEQ ID NO: 4302 - RNA, 21 nt, Artificial Sequence
  C3-targeting RNA guide sequence portion
gaguggggcacgggagugggc

SEQ ID NO: 4303 - RNA, 21 nt, Artificial Sequence
  C3-targeting RNA guide sequence portion
gagugguuaugacucuaccca

SEQ ID NO: 4304 - RNA, 21 nt, Artificial Sequence
  C3-targeting RNA guide sequence portion
gaguguuuacauauuuggagu

SEQ ID NO: 4305 - RNA, 21 nt, Artificial Sequence
  C3-targeting RNA guide sequence portion
gaguguuuagagagguagagg

SEQ ID NO: 4306 - RNA, 21 nt, Artificial Sequence
  C3-targeting RNA guide sequence portion
gaguugaggguguccgggagu

SEQ ID NO: 4307 - RNA, 21 nt, Artificial Sequence
  C3-targeting RNA guide sequence portion
gaguugcugacgcugguugga

SEQ ID NO: 4308 - RNA, 21 nt, Artificial Sequence
  C3-targeting RNA guide sequence portion
gaguuuauauacauuugggcu

SEQ ID NO: 4309 - RNA, 21 nt, Artificial Sequence
  C3-targeting RNA guide sequence portion
gaguuugaguguuuacauauu

SEQ ID NO: 4310 - RNA, 21 nt, Artificial Sequence
  C3-targeting RNA guide sequence portion
gaguuugcagcuuggggacuu

SEQ ID NO: 4311 - RNA, 21 nt, Artificial Sequence
  C3-targeting RNA guide sequence portion
gaguuugggauguuucuagaa

SEQ ID NO: 4312 - RNA, 21 nt, Artificial Sequence
  C3-targeting RNA guide sequence portion
gaguuuggguguuuauggguu

SEQ ID NO: 4313 - RNA, 21 nt, Artificial Sequence
  C3-targeting RNA guide sequence portion
gauaauggcauuggcaagugc

SEQ ID NO: 4314 - RNA, 21 nt, Artificial Sequence
  C3-targeting RNA guide sequence portion
gauccagugacugccggcgca

SEQ ID NO: 4315 - RNA, 21 nt, Artificial Sequence
  C3-targeting RNA guide sequence portion
gauccucuccaggaccagagg

SEQ ID NO: 4316 - RNA, 21 nt, Artificial Sequence
  C3-targeting RNA guide sequence portion
gaugaccucaauucuagaaac

SEQ ID NO: 4317 - RNA, 21 nt, Artificial Sequence
  C3-targeting RNA guide sequence portion
gaugugagacgccaguccuca

SEQ ID NO: 4318 - RNA, 21 nt, Artificial Sequence
  C3-targeting RNA guide sequence portion
gauguguggcccccucguugc

SEQ ID NO: 4319 - RNA, 21 nt, Artificial Sequence
  C3-targeting RNA guide sequence portion
gauguuucuagaauugagguc

SEQ ID NO: 4320 - RNA, 21 nt, Artificial Sequence
  C3-targeting RNA guide sequence portion
gauuauauauauuugggcugc

SEQ ID NO: 4321 - RNA, 21 nt, Artificial Sequence
  C3-targeting RNA guide sequence portion
gauucagggguuagcagguug

SEQ ID NO: 4322 - RNA, 21 nt, Artificial Sequence
  C3-targeting RNA guide sequence portion
gauuccacaaacacccaaccc

SEQ ID NO: 4323 - RNA, 21 nt, Artificial Sequence
  C3-targeting RNA guide sequence portion
gauuggcuacuucggguucau

SEQ ID NO: 4324 - RNA, 21 nt, Artificial Sequence
  C3-targeting RNA guide sequence portion
gauuguauuuauuaggacugg

SEQ ID NO: 4325 - RNA, 21 nt, Artificial Sequence
  C3-targeting RNA guide sequence portion
gauugugggucuggaagucca

SEQ ID NO: 4326 - RNA, 21 nt, Artificial Sequence
  C3-targeting RNA guide sequence portion
gauuugagguuuagagguuuu

SEQ ID NO: 4327 - RNA, 21 nt, Artificial Sequence
  C3-targeting RNA guide sequence portion
gauuugggaguuugcagcuug

SEQ ID NO: 4328 - RNA, 21 nt, Artificial Sequence
  C3-targeting RNA guide sequence portion
gcaaacucccaaaucuuguaa

SEQ ID NO: 4329 - RNA, 21 nt, Artificial Sequence
  C3-targeting RNA guide sequence portion
gcaacgagggggccacacauc

SEQ ID NO: 4330 - RNA, 21 nt, Artificial Sequence
  C3-targeting RNA guide sequence portion
gcaacuccuccaagucucugg

SEQ ID NO: 4331 - RNA, 21 nt, Artificial Sequence
  C3-targeting RNA guide sequence portion
gcaaguccccaagcugcaaac

SEQ ID NO: 4332 - RNA, 21 nt, Artificial Sequence
  C3-targeting RNA guide sequence portion
gcaagugcgccggcagucacu

SEQ ID NO: 4333 - RNA, 21 nt, Artificial Sequence
  C3-targeting RNA guide sequence portion
gcaauuuucaguguggguuua

SEQ ID NO: 4334 - RNA, 21 nt, Artificial Sequence
  C3-targeting RNA guide sequence portion
gcacacagccugccaggcgcu

SEQ ID NO: 4335 - RNA, 21 nt, Artificial Sequence
  C3-targeting RNA guide sequence portion
gcaccaucaaugaacaccaca

SEQ ID NO: 4336 - RNA, 21 nt, Artificial Sequence
  C3-targeting RNA guide sequence portion
gcaccccaaacccagccuaaa

SEQ ID NO: 4337 - RNA, 21 nt, Artificial Sequence
  C3-targeting RNA guide sequence portion
gcacccugaauucuacaggga

SEQ ID NO: 4338 - RNA, 21 nt, Artificial Sequence
  C3-targeting RNA guide sequence portion
gcacgggagugggcuugucau

SEQ ID NO: 4339 - RNA, 21 nt, Artificial Sequence
  C3-targeting RNA guide sequence portion
gcacugccaccgucucaacca

SEQ ID NO: 4340 - RNA, 21 nt, Artificial Sequence
  C3-targeting RNA guide sequence portion
gcagacauuuggggguccagg

SEQ ID NO: 4341 - RNA, 21 nt, Artificial Sequence
  C3-targeting RNA guide sequence portion
gcagccaccaugacucccacu

SEQ ID NO: 4342 - RNA, 21 nt, Artificial Sequence
  C3-targeting RNA guide sequence portion
gcagcccaaauauauauaauc

SEQ ID NO: 4343 - RNA, 21 nt, Artificial Sequence
  C3-targeting RNA guide sequence portion
gcagcuuggggacuugcaauu

SEQ ID NO: 4344 - RNA, 21 nt, Artificial Sequence
  C3-targeting RNA guide sequence portion
gcaggacagcagccaccauga

SEQ ID NO: 4345 - RNA, 21 nt, Artificial Sequence
  C3-targeting RNA guide sequence portion
gcaggcugugugccccagccu

SEQ ID NO: 4346 - RNA, 21 nt, Artificial Sequence
  C3-targeting RNA guide sequence portion
gcagucacuggauccucucca

SEQ ID NO: 4347 - RNA, 21 nt, Artificial Sequence
  C3-targeting RNA guide sequence portion
gcagugcccagagaagauaau

SEQ ID NO: 4348 - RNA, 21 nt, Artificial Sequence
  C3-targeting RNA guide sequence portion
gcauguguggguuuaggcgau

SEQ ID NO: 4349 - RNA, 21 nt, Artificial Sequence
  C3-targeting RNA guide sequence portion
gcauuggcaagugcgccggca

SEQ ID NO: 4350 - RNA, 21 nt, Artificial Sequence
  C3-targeting RNA guide sequence portion
gcauuuggguguuuguggauu

SEQ ID NO: 4351 - RNA, 21 nt, Artificial Sequence
  C3-targeting RNA guide sequence portion
gccaaaaccucuaaaccucaa

SEQ ID NO: 4352 - RNA, 21 nt, Artificial Sequence
  C3-targeting RNA guide sequence portion
gccaaucuuuaaacccacacu

SEQ ID NO: 4353 - RNA, 21 nt, Artificial Sequence
  C3-targeting RNA guide sequence portion
gccaaugccauuaucuucucu

SEQ ID NO: 4354 - RNA, 21 nt, Artificial Sequence
  C3-targeting RNA guide sequence portion
gccacacaucccaccaaaccc

SEQ ID NO: 4355 - RNA, 21 nt, Artificial Sequence
  C3-targeting RNA guide sequence portion
gccaccaugacucccacucuc

SEQ ID NO: 4356 - RNA, 21 nt, Artificial Sequence
  C3-targeting RNA guide sequence portion
gccaccgucucaaccacaugg

SEQ ID NO: 4357 - RNA, 21 nt, Artificial Sequence
  C3-targeting RNA guide sequence portion
gccagcugggccuggccuuug

SEQ ID NO: 4358 - RNA, 21 nt, Artificial Sequence
  C3-targeting RNA guide sequence portion
gccaggcccagcuggcugaga

SEQ ID NO: 4359 - RNA, 21 nt, Artificial Sequence
  C3-targeting RNA guide sequence portion
gccaggcgcugacuccaguga

SEQ ID NO: 4360 - RNA, 21 nt, Artificial Sequence
  C3-targeting RNA guide sequence portion
gccaguccucacuggagucag

SEQ ID NO: 4361 - RNA, 21 nt, Artificial Sequence
  C3-targeting RNA guide sequence portion
gccauuaucuucucugggcac

SEQ ID NO: 4362 - RNA, 21 nt, Artificial Sequence
  C3-targeting RNA guide sequence portion
gcccaaauauauauaaucauu

SEQ ID NO: 4363 - RNA, 21 nt, Artificial Sequence
  C3-targeting RNA guide sequence portion
gcccacucccgugccccacuc

SEQ ID NO: 4364 - RNA, 21 nt, Artificial Sequence
  C3-targeting RNA guide sequence portion
gcccagagaagauaauggcau

SEQ ID NO: 4365 - RNA, 21 nt, Artificial Sequence
  C3-targeting RNA guide sequence portion
gcccagcuggcugagaguggg

SEQ ID NO: 4366 - RNA, 21 nt, Artificial Sequence
  C3-targeting RNA guide sequence portion
gcccaggcuuucaaaggccag

SEQ ID NO: 4367 - RNA, 21 nt, Artificial Sequence
  C3-targeting RNA guide sequence portion
gcccaugugguugagacggug

SEQ ID NO: 4368 - RNA, 21 nt, Artificial Sequence
  C3-targeting RNA guide sequence portion
gccccaaacccuaaaccucua

SEQ ID NO: 4369 - RNA, 21 nt, Artificial Sequence
  C3-targeting RNA guide sequence portion
gccccaacuauacaugaaccc

SEQ ID NO: 4370 - RNA, 21 nt, Artificial Sequence
  C3-targeting RNA guide sequence portion
gccccagccucugguccugga

SEQ ID NO: 4371 - RNA, 21 nt, Artificial Sequence
  C3-targeting RNA guide sequence portion
gcccccucguugcccaggcuu

SEQ ID NO: 4372 - RNA, 21 nt, Artificial Sequence
  C3-targeting RNA guide sequence portion
gcccuguuuguggguagaguc

SEQ ID NO: 4373 - RNA, 21 nt, Artificial Sequence
  C3-targeting RNA guide sequence portion
gccggcagucacuggauccuc

SEQ ID NO: 4374 - RNA, 21 nt, Artificial Sequence
  C3-targeting RNA guide sequence portion
gccggcgcacuugccaaugcc

SEQ ID NO: 4375 - RNA, 21 nt, Artificial Sequence
  C3-targeting RNA guide sequence portion
gccuaaacccacacaugcccc

SEQ ID NO: 4376 - RNA, 21 nt, Artificial Sequence
  C3-targeting RNA guide sequence portion
gccuaaaccuccaacacccca

SEQ ID NO: 4377 - RNA, 21 nt, Artificial Sequence
  C3-targeting RNA guide sequence portion
gccucugguccuggagaggau

SEQ ID NO: 4378 - RNA, 21 nt, Artificial Sequence
  C3-targeting RNA guide sequence portion
gccugagaguuuggguguuua

SEQ ID NO: 4379 - RNA, 21 nt, Artificial Sequence
  C3-targeting RNA guide sequence portion
gccugccaggcgcugacucca

SEQ ID NO: 4380 - RNA, 21 nt, Artificial Sequence
  C3-targeting RNA guide sequence portion
gccuggcaggcugugugcccc

SEQ ID NO: 4381 - RNA, 21 nt, Artificial Sequence
  C3-targeting RNA guide sequence portion
gccuggccuuugaaagccugg

SEQ ID NO: 4382 - RNA, 21 nt, Artificial Sequence
  C3-targeting RNA guide sequence portion
gccugggcaacgagggggcca

SEQ ID NO: 4383 - RNA, 21 nt, Artificial Sequence
  C3-targeting RNA guide sequence portion
gccuuugaaagccugggcaac

SEQ ID NO: 4384 - RNA, 21 nt, Artificial Sequence
  C3-targeting RNA guide sequence portion
gcgauugugggucuggaaguc

SEQ ID NO: 4385 - RNA, 21 nt, Artificial Sequence
  C3-targeting RNA guide sequence portion
gcgcacuugccaaugccauua

SEQ ID NO: 4386 - RNA, 21 nt, Artificial Sequence
  C3-targeting RNA guide sequence portion
gcgccggcagucacuggaucc

SEQ ID NO: 4387 - RNA, 21 nt, Artificial Sequence
  C3-targeting RNA guide sequence portion
gcgccuggcaggcugugugcc

SEQ ID NO: 4388 - RNA, 21 nt, Artificial Sequence
  C3-targeting RNA guide sequence portion
gcgcugacuccagugaggacu

SEQ ID NO: 4389 - RNA, 21 nt, Artificial Sequence
  C3-targeting RNA guide sequence portion
gcguauguggguuuggguagg

SEQ ID NO: 4390 - RNA, 21 nt, Artificial Sequence
  C3-targeting RNA guide sequence portion
gcgucagcaacuccuccaagu

SEQ ID NO: 4391 - RNA, 21 nt, Artificial Sequence
  C3-targeting RNA guide sequence portion
gcgucucacauccguggaaug

SEQ ID NO: 4392 - RNA, 21 nt, Artificial Sequence
  C3-targeting RNA guide sequence portion
gcuaaccccugaauccacaaa

SEQ ID NO: 4393 - RNA, 21 nt, Artificial Sequence
  C3-targeting RNA guide sequence portion
gcuacuucggguucauguaua

SEQ ID NO: 4394 - RNA, 21 nt, Artificial Sequence
  C3-targeting RNA guide sequence portion
gcucuaagauuugagguuuag

SEQ ID NO: 4395 - RNA, 21 nt, Artificial Sequence
  C3-targeting RNA guide sequence portion
gcugacgcugguuggaagguu

SEQ ID NO: 4396 - RNA, 21 nt, Artificial Sequence
  C3-targeting RNA guide sequence portion
gcugacuccagugaggacugg

SEQ ID NO: 4397 - RNA, 21 nt, Artificial Sequence
  C3-targeting RNA guide sequence portion
gcugagagugggagucauggu

SEQ ID NO: 4398 - RNA, 21 nt, Artificial Sequence
  C3-targeting RNA guide sequence portion
gcugcaaacucccaaaucuug

SEQ ID NO: 4399 - RNA, 21 nt, Artificial Sequence
  C3-targeting RNA guide sequence portion
gcugccugagaguuugggugu

SEQ ID NO: 4400 - RNA, 21 nt, Artificial Sequence
  C3-targeting RNA guide sequence portion
gcugcuguccugcccaugugg

SEQ ID NO: 4401 - RNA, 21 nt, Artificial Sequence
  C3-targeting RNA guide sequence portion
gcuggcugagagugggaguca

SEQ ID NO: 4402 - RNA, 21 nt, Artificial Sequence
  C3-targeting RNA guide sequence portion
gcugggccuggccuuugaaag

SEQ ID NO: 4403 - RNA, 21 nt, Artificial Sequence
  C3-targeting RNA guide sequence portion
gcuggggcacacagccugcca

SEQ ID NO: 4404 - RNA, 21 nt, Artificial Sequence
  C3-targeting RNA guide sequence portion
gcuggguuuggggugcucuaa

SEQ ID NO: 4405 - RNA, 21 nt, Artificial Sequence
  C3-targeting RNA guide sequence portion
gcugguucugggguggaagca

SEQ ID NO: 4406 - RNA, 21 nt, Artificial Sequence
  C3-targeting RNA guide sequence portion
gcugguuggaagguucagggu

SEQ ID NO: 4407 - RNA, 21 nt, Artificial Sequence
  C3-targeting RNA guide sequence portion
gcuguccugcccaugugguug

SEQ ID NO: 4408 - RNA, 21 nt, Artificial Sequence
  C3-targeting RNA guide sequence portion
gcugugugccccagccucugg

SEQ ID NO: 4409 - RNA, 21 nt, Artificial Sequence
  C3-targeting RNA guide sequence portion
gcuuccaccccagaaccagcc

SEQ ID NO: 4410 - RNA, 21 nt, Artificial Sequence
  C3-targeting RNA guide sequence portion
gcuuggggacuugcaauuuuc

SEQ ID NO: 4411 - RNA, 21 nt, Artificial Sequence
  C3-targeting RNA guide sequence portion
gcuugucauuccacggaugug

SEQ ID NO: 4412 - RNA, 21 nt, Artificial Sequence
  C3-targeting RNA guide sequence portion
gcuuucaaaggccaggcccag

SEQ ID NO: 4413 - RNA, 21 nt, Artificial Sequence
  C3-targeting RNA guide sequence portion
ggaagcagacauuuggggguc

SEQ ID NO: 4414 - RNA, 21 nt, Artificial Sequence
  C3-targeting RNA guide sequence portion
ggaagguucaggguuuggugg

SEQ ID NO: 4415 - RNA, 21 nt, Artificial Sequence
  C3-targeting RNA guide sequence portion
ggaaguccagagacuuggagg

SEQ ID NO: 4416 - RNA, 21 nt, Artificial Sequence
  C3-targeting RNA guide sequence portion
ggaauccagguaucauggaau

SEQ ID NO: 4417 - RNA, 21 nt, Artificial Sequence
  C3-targeting RNA guide sequence portion
ggaauccagguaucguggaau

SEQ ID NO: 4418 - RNA, 21 nt, Artificial Sequence
  C3-targeting RNA guide sequence portion
ggaauccagguaugguggaau

SEQ ID NO: 4419 - RNA, 21 nt, Artificial Sequence
  C3-targeting RNA guide sequence portion
ggaaugacaagcccacucccg

SEQ ID NO: 4420 - RNA, 21 nt, Artificial Sequence
  C3-targeting RNA guide sequence portion
ggaaugauuauauauauuugg

SEQ ID NO: 4421 - RNA, 21 nt, Artificial Sequence
  C3-targeting RNA guide sequence portion
ggaauugauuguauuuauuag

SEQ ID NO: 4422 - RNA, 21 nt, Artificial Sequence
  C3-targeting RNA guide sequence portion
ggaauuggaguuugggauguu

SEQ ID NO: 4423 - RNA, 21 nt, Artificial Sequence
  C3-targeting RNA guide sequence portion
ggacacccucaacucuaccua

SEQ ID NO: 4424 - RNA, 21 nt, Artificial Sequence
  C3-targeting RNA guide sequence portion
ggacagcagccaccaugacuc

SEQ ID NO: 4425 - RNA, 21 nt, Artificial Sequence
  C3-targeting RNA guide sequence portion
ggaccagaggcuggggcacac

SEQ ID NO: 4426 - RNA, 21 nt, Artificial Sequence
  C3-targeting RNA guide sequence portion
ggacccccaaaugucugcuuc

SEQ ID NO: 4427 - RNA, 21 nt, Artificial Sequence
  C3-targeting RNA guide sequence portion
ggaccuggacccccaaauguc

SEQ ID NO: 4428 - RNA, 21 nt, Artificial Sequence
  C3-targeting RNA guide sequence portion
ggacuggcgucucacauccgu

SEQ ID NO: 4429 - RNA, 21 nt, Artificial Sequence
  C3-targeting RNA guide sequence portion
ggacugggguguuggagguuu

SEQ ID NO: 4430 - RNA, 21 nt, Artificial Sequence
  C3-targeting RNA guide sequence portion
ggacuuccagacccacaaucg

SEQ ID NO: 4431 - RNA, 21 nt, Artificial Sequence
  C3-targeting RNA guide sequence portion
ggacuugcaauuuucagugug

SEQ ID NO: 4432 - RNA, 21 nt, Artificial Sequence
  C3-targeting RNA guide sequence portion
ggacuuuacaagauuugggag

SEQ ID NO: 4433 - RNA, 21 nt, Artificial Sequence
  C3-targeting RNA guide sequence portion
ggagacucggagguuuggacu

SEQ ID NO: 4434 - RNA, 21 nt, Artificial Sequence
  C3-targeting RNA guide sequence portion
ggagaggauccagugacugcc

SEQ ID NO: 4435 - RNA, 21 nt, Artificial Sequence
  C3-targeting RNA guide sequence portion
ggaggaguugcugacgcuggu

SEQ ID NO: 4436 - RNA, 21 nt, Artificial Sequence
  C3-targeting RNA guide sequence portion
ggagguuuaggcuggguuugg

SEQ ID NO: 4437 - RNA, 21 nt, Artificial Sequence
  C3-targeting RNA guide sequence portion
ggagguuuggacuuuacaaga

SEQ ID NO: 4438 - RNA, 21 nt, Artificial Sequence
  C3-targeting RNA guide sequence portion
ggagucagcgccuggcaggcu

SEQ ID NO: 4439 - RNA, 21 nt, Artificial Sequence
  C3-targeting RNA guide sequence portion
ggagucaugguggcugcuguc

SEQ ID NO: 4440 - RNA, 21 nt, Artificial Sequence
  C3-targeting RNA guide sequence portion
ggagugggcuugucauuccac

SEQ ID NO: 4441 - RNA, 21 nt, Artificial Sequence
  C3-targeting RNA guide sequence portion
ggaguggggcacgggaguggg

SEQ ID NO: 4442 - RNA, 21 nt, Artificial Sequence
  C3-targeting RNA guide sequence portion
ggaguguuuagagagguagag

SEQ ID NO: 4443 - RNA, 21 nt, Artificial Sequence
  C3-targeting RNA guide sequence portion
ggaguugcugacgcugguugg

SEQ ID NO: 4444 - RNA, 21 nt, Artificial Sequence
  C3-targeting RNA guide sequence portion
ggaguuugaguguuuacauau

SEQ ID NO: 4445 - RNA, 21 nt, Artificial Sequence
  C3-targeting RNA guide sequence portion
ggaguuugcagcuuggggacu

SEQ ID NO: 4446 - RNA, 21 nt, Artificial Sequence
  C3-targeting RNA guide sequence portion
ggaguuugggauguuucuaga

SEQ ID NO: 4447 - RNA, 21 nt, Artificial Sequence
  C3-targeting RNA guide sequence portion
ggauccagugacugccggcgc

SEQ ID NO: 4448 - RNA, 21 nt, Artificial Sequence
  C3-targeting RNA guide sequence portion
ggauccucuccaggaccagag

SEQ ID NO: 4449 - RNA, 21 nt, Artificial Sequence
  C3-targeting RNA guide sequence portion
ggaugugagacgccaguccuc

SEQ ID NO: 4450 - RNA, 21 nt, Artificial Sequence
  C3-targeting RNA guide sequence portion
ggauguguggcccccucguug

SEQ ID NO: 4451 - RNA, 21 nt, Artificial Sequence
  C3-targeting RNA guide sequence portion
ggauguuucuagaauugaggu

SEQ ID NO: 4452 - RNA, 21 nt, Artificial Sequence
  C3-targeting RNA guide sequence portion
ggauucagggguuagcagguu

SEQ ID NO: 4453 - RNA, 21 nt, Artificial Sequence
  C3-targeting RNA guide sequence portion
ggauuccacaaacacccaacc

SEQ ID NO: 4454 - RNA, 21 nt, Artificial Sequence
  C3-targeting RNA guide sequence portion
ggcaacgagggggccacacau

SEQ ID NO: 4455 - RNA, 21 nt, Artificial Sequence
  C3-targeting RNA guide sequence portion
ggcaagugcgccggcagucac

SEQ ID NO: 4456 - RNA, 21 nt, Artificial Sequence
  C3-targeting RNA guide sequence portion
ggcacacagccugccaggcgc

SEQ ID NO: 4457 - RNA, 21 nt, Artificial Sequence
  C3-targeting RNA guide sequence portion
ggcacgggagugggcuuguca

SEQ ID NO: 4458 - RNA, 21 nt, Artificial Sequence
  C3-targeting RNA guide sequence portion
ggcacugccaccgucucaacc

SEQ ID NO: 4459 - RNA, 21 nt, Artificial Sequence
  C3-targeting RNA guide sequence portion
ggcagcccaaauauauauaau

SEQ ID NO: 4460 - RNA, 21 nt, Artificial Sequence
  C3-targeting RNA guide sequence portion
ggcaggacagcagccaccaug

SEQ ID NO: 4461 - RNA, 21 nt, Artificial Sequence
  C3-targeting RNA guide sequence portion
ggcaggcugugugccccagcc

SEQ ID NO: 4462 - RNA, 21 nt, Artificial Sequence
  C3-targeting RNA guide sequence portion
ggcagucacuggauccucucc

SEQ ID NO: 4463 - RNA, 21 nt, Artificial Sequence
  C3-targeting RNA guide sequence portion
ggcagugcccagagaagauaa

SEQ ID NO: 4464 - RNA, 21 nt, Artificial Sequence
  C3-targeting RNA guide sequence portion
ggcauguguggguuuaggcga

SEQ ID NO: 4465 - RNA, 21 nt, Artificial Sequence
  C3-targeting RNA guide sequence portion
ggcauuggcaagugcgccggc

SEQ ID NO: 4466 - RNA, 21 nt, Artificial Sequence
  C3-targeting RNA guide sequence portion
ggccacacaucccaccaaacc

SEQ ID NO: 4467 - RNA, 21 nt, Artificial Sequence
  C3-targeting RNA guide sequence portion
ggccaggcccagcuggcugag

SEQ ID NO: 4468 - RNA, 21 nt, Artificial Sequence
  C3-targeting RNA guide sequence portion
ggcccagcuggcugagagugg

SEQ ID NO: 4469 - RNA, 21 nt, Artificial Sequence
  C3-targeting RNA guide sequence portion
ggcccccucguugcccaggcu

SEQ ID NO: 4470 - RNA, 21 nt, Artificial Sequence
  C3-targeting RNA guide sequence portion
ggccuggccuuugaaagccug

SEQ ID NO: 4471 - RNA, 21 nt, Artificial Sequence
  C3-targeting RNA guide sequence portion
ggccuuugaaagccugggcaa

SEQ ID NO: 4472 - RNA, 21 nt, Artificial Sequence
  C3-targeting RNA guide sequence portion
ggcgauugugggucuggaagu

SEQ ID NO: 4473 - RNA, 21 nt, Artificial Sequence
  C3-targeting RNA guide sequence portion
ggcgcacuugccaaugccauu

SEQ ID NO: 4474 - RNA, 21 nt, Artificial Sequence
  C3-targeting RNA guide sequence portion
ggcgcugacuccagugaggac

SEQ ID NO: 4475 - RNA, 21 nt, Artificial Sequence
  C3-targeting RNA guide sequence portion
ggcguauguggguuuggguag

SEQ ID NO: 4476 - RNA, 21 nt, Artificial Sequence
  C3-targeting RNA guide sequence portion
ggcgucucacauccguggaau

SEQ ID NO: 4477 - RNA, 21 nt, Artificial Sequence
  C3-targeting RNA guide sequence portion
ggcuacuucggguucauguau

SEQ ID NO: 4478 - RNA, 21 nt, Artificial Sequence
  C3-targeting RNA guide sequence portion
ggcugagagugggagucaugg

SEQ ID NO: 4479 - RNA, 21 nt, Artificial Sequence
  C3-targeting RNA guide sequence portion
ggcugccugagaguuugggug

SEQ ID NO: 4480 - RNA, 21 nt, Artificial Sequence
  C3-targeting RNA guide sequence portion
ggcugcuguccugcccaugug

SEQ ID NO: 4481 - RNA, 21 nt, Artificial Sequence
  C3-targeting RNA guide sequence portion
ggcuggggcacacagccugcc

SEQ ID NO: 4482 - RNA, 21 nt, Artificial Sequence
  C3-targeting RNA guide sequence portion
ggcuggguuuggggugcucua

SEQ ID NO: 4483 - RNA, 21 nt, Artificial Sequence
  C3-targeting RNA guide sequence portion
ggcugguucugggguggaagc

SEQ ID NO: 4484 - RNA, 21 nt, Artificial Sequence
  C3-targeting RNA guide sequence portion
ggcugugugccccagccucug

SEQ ID NO: 4485 - RNA, 21 nt, Artificial Sequence
  C3-targeting RNA guide sequence portion
ggcuugucauuccacggaugu

SEQ ID NO: 4486 - RNA, 21 nt, Artificial Sequence
  C3-targeting RNA guide sequence portion
ggcuuucaaaggccaggccca

SEQ ID NO: 4487 - RNA, 21 nt, Artificial Sequence
  C3-targeting RNA guide sequence portion
gggaaugauuauauauauuug

SEQ ID NO: 4488 - RNA, 21 nt, Artificial Sequence
  C3-targeting RNA guide sequence portion
gggaccuggacccccaaaugu

SEQ ID NO: 4489 - RNA, 21 nt, Artificial Sequence
  C3-targeting RNA guide sequence portion
gggacuugcaauuuucagugu

SEQ ID NO: 4490 - RNA, 21 nt, Artificial Sequence
  C3-targeting RNA guide sequence portion
gggagucaugguggcugcugu

SEQ ID NO: 4491 - RNA, 21 nt, Artificial Sequence
  C3-targeting RNA guide sequence portion
gggagugggcuugucauucca

SEQ ID NO: 4492 - RNA, 21 nt, Artificial Sequence
  C3-targeting RNA guide sequence portion
gggaguuugaguguuuacaua

SEQ ID NO: 4493 - RNA, 21 nt, Artificial Sequence
  C3-targeting RNA guide sequence portion
gggaguuugcagcuuggggac

SEQ ID NO: 4494 - RNA, 21 nt, Artificial Sequence
  C3-targeting RNA guide sequence portion
gggauguguggcccccucguu

SEQ ID NO: 4495 - RNA, 21 nt, Artificial Sequence
  C3-targeting RNA guide sequence portion
gggauguuucuagaauugagg

SEQ ID NO: 4496 - RNA, 21 nt, Artificial Sequence
  C3-targeting RNA guide sequence portion
gggcaacgagggggccacaca

SEQ ID NO: 4497 - RNA, 21 nt, Artificial Sequence
  C3-targeting RNA guide sequence portion
gggcacacagccugccaggcg

SEQ ID NO: 4498 - RNA, 21 nt, Artificial Sequence
  C3-targeting RNA guide sequence portion
gggcacgggagugggcuuguc

SEQ ID NO: 4499 - RNA, 21 nt, Artificial Sequence
  C3-targeting RNA guide sequence portion
gggcacugccaccgucucaac

SEQ ID NO: 4500 - RNA, 21 nt, Artificial Sequence
  C3-targeting RNA guide sequence portion
gggcaggacagcagccaccau

SEQ ID NO: 4501 - RNA, 21 nt, Artificial Sequence
  C3-targeting RNA guide sequence portion
gggcauguguggguuuaggcg

SEQ ID NO: 4502 - RNA, 21 nt, Artificial Sequence
  C3-targeting RNA guide sequence portion
gggccacacaucccaccaaac

SEQ ID NO: 4503 - RNA, 21 nt, Artificial Sequence
  C3-targeting RNA guide sequence portion
gggccuggccuuugaaagccu

SEQ ID NO: 4504 - RNA, 21 nt, Artificial Sequence
  C3-targeting RNA guide sequence portion
gggcugccugagaguuugggu

SEQ ID NO: 4505 - RNA, 21 nt, Artificial Sequence
  C3-targeting RNA guide sequence portion
gggcugguucugggguggaag

SEQ ID NO: 4506 - RNA, 21 nt, Artificial Sequence
  C3-targeting RNA guide sequence portion
gggcuugucauuccacggaug

SEQ ID NO: 4507 - RNA, 21 nt, Artificial Sequence
  C3-targeting RNA guide sequence portion
ggggacuugcaauuuucagug

SEQ ID NO: 4508 - RNA, 21 nt, Artificial Sequence
  C3-targeting RNA guide sequence portion
ggggcacacagccugccaggc

SEQ ID NO: 4509 - RNA, 21 nt, Artificial Sequence
  C3-targeting RNA guide sequence portion
ggggcacgggagugggcuugu

SEQ ID NO: 4510 - RNA, 21 nt, Artificial Sequence
  C3-targeting RNA guide sequence portion
ggggcauguguggguuuaggc

SEQ ID NO: 4511 - RNA, 21 nt, Artificial Sequence
  C3-targeting RNA guide sequence portion
ggggcauuuggaauugauugu

SEQ ID NO: 4512 - RNA, 21 nt, Artificial Sequence
  C3-targeting RNA guide sequence portion
ggggccacacaucccaccaaa

SEQ ID NO: 4513 - RNA, 21 nt, Artificial Sequence
  C3-targeting RNA guide sequence portion
gggggccacacaucccaccaa

SEQ ID NO: 4514 - RNA, 21 nt, Artificial Sequence
  C3-targeting RNA guide sequence portion
ggggguccaggucccuguaga

SEQ ID NO: 4515 - RNA, 21 nt, Artificial Sequence
  C3-targeting RNA guide sequence portion
gggguccaggucccuguagaa

SEQ ID NO: 4516 - RNA, 21 nt, Artificial Sequence
  C3-targeting RNA guide sequence portion
ggggugcucuaagauuugagg

SEQ ID NO: 4517 - RNA, 21 nt, Artificial Sequence
  C3-targeting RNA guide sequence portion
gggguggaagcagacauuugg

SEQ ID NO: 4518 - RNA, 21 nt, Artificial Sequence
  C3-targeting RNA guide sequence portion
gggguguuggagguuuaggcu

SEQ ID NO: 4519 - RNA, 21 nt, Artificial Sequence
  C3-targeting RNA guide sequence portion
gggguuagcagguugggaaug

SEQ ID NO: 4520 - RNA, 21 nt, Artificial Sequence
  C3-targeting RNA guide sequence portion
ggguagguagaguugagggug

SEQ ID NO: 4521 - RNA, 21 nt, Artificial Sequence
  C3-targeting RNA guide sequence portion
ggguccaggucccuguagaau

SEQ ID NO: 4522 - RNA, 21 nt, Artificial Sequence
  C3-targeting RNA guide sequence portion
gggucuggaaguccagagacu

SEQ ID NO: 4523 - RNA, 21 nt, Artificial Sequence
  C3-targeting RNA guide sequence portion
gggugcauuuggguguuugug

SEQ ID NO: 4524 - RNA, 21 nt, Artificial Sequence
  C3-targeting RNA guide sequence portion
gggugcucuaagauuugaggu

SEQ ID NO: 4525 - RNA, 21 nt, Artificial Sequence
  C3-targeting RNA guide sequence portion
ggguggaagcagacauuuggg

SEQ ID NO: 4526 - RNA, 21 nt, Artificial Sequence
  C3-targeting RNA guide sequence portion
ggguguaugugguguucauug

SEQ ID NO: 4527 - RNA, 21 nt, Artificial Sequence
  C3-targeting RNA guide sequence portion
ggguguccgggaguuugagug

SEQ ID NO: 4528 - RNA, 21 nt, Artificial Sequence
  C3-targeting RNA guide sequence portion
ggguguuggagguuuaggcug

SEQ ID NO: 4529 - RNA, 21 nt, Artificial Sequence
  C3-targeting RNA guide sequence portion
ggguguuuauggguugggugu

SEQ ID NO: 4530 - RNA, 21 nt, Artificial Sequence
  C3-targeting RNA guide sequence portion
ggguguuuguggaauccaggu

SEQ ID NO: 4531 - RNA, 21 nt, Artificial Sequence
  C3-targeting RNA guide sequence portion
ggguguuuguggauucagggg

SEQ ID NO: 4532 - RNA, 21 nt, Artificial Sequence
  C3-targeting RNA guide sequence portion
ggguuagcagguugggaauga

SEQ ID NO: 4533 - RNA, 21 nt, Artificial Sequence
  C3-targeting RNA guide sequence portion
ggguucauguauaguuggggc

SEQ ID NO: 4534 - RNA, 21 nt, Artificial Sequence
  C3-targeting RNA guide sequence portion
ggguuggguguuuguggaauc

SEQ ID NO: 4535 - RNA, 21 nt, Artificial Sequence
  C3-targeting RNA guide sequence portion
ggguuuaaagauuggcuacuu

SEQ ID NO: 4536 - RNA, 21 nt, Artificial Sequence
  C3-targeting RNA guide sequence portion
ggguuuaggcgauuguggguc

SEQ ID NO: 4537 - RNA, 21 nt, Artificial Sequence
  C3-targeting RNA guide sequence portion
ggguuuggggcaugugugggu

SEQ ID NO: 4538 - RNA, 21 nt, Artificial Sequence
  C3-targeting RNA guide sequence portion
ggguuuggggugcucuaagau

SEQ ID NO: 4539 - RNA, 21 nt, Artificial Sequence
  C3-targeting RNA guide sequence portion
ggguuuggguagguagaguug

SEQ ID NO: 4540 - RNA, 21 nt, Artificial Sequence
  C3-targeting RNA guide sequence portion
ggguuuggugggauguguggc

SEQ ID NO: 4541 - RNA, 21 nt, Artificial Sequence
  C3-targeting RNA guide sequence portion
gguagagguuuaggguuuggg

SEQ ID NO: 4542 - RNA, 21 nt, Artificial Sequence
  C3-targeting RNA guide sequence portion
gguagaguugaggguguccgg

SEQ ID NO: 4543 - RNA, 21 nt, Artificial Sequence
  C3-targeting RNA guide sequence portion
gguagguagaguugagggugu

SEQ ID NO: 4544 - RNA, 21 nt, Artificial Sequence
  C3-targeting RNA guide sequence portion
gguaucauggaauuggaguuu

SEQ ID NO: 4545 - RNA, 21 nt, Artificial Sequence
  C3-targeting RNA guide sequence portion
gguaucguggaauuggaguuu

SEQ ID NO: 4546 - RNA, 21 nt, Artificial Sequence
  C3-targeting RNA guide sequence portion
gguaugguggaauuggaguuu

SEQ ID NO: 4547 - RNA, 21 nt, Artificial Sequence
  C3-targeting RNA guide sequence portion
ggucaucuguugguuuagggu

SEQ ID NO: 4548 - RNA, 21 nt, Artificial Sequence
  C3-targeting RNA guide sequence portion
gguccaggucccuguagaauu

SEQ ID NO: 4549 - RNA, 21 nt, Artificial Sequence
  C3-targeting RNA guide sequence portion
ggucccuguagaauucagggu

SEQ ID NO: 4550 - RNA, 21 nt, Artificial Sequence
  C3-targeting RNA guide sequence portion
gguccuggagaggauccagug

SEQ ID NO: 4551 - RNA, 21 nt, Artificial Sequence
  C3-targeting RNA guide sequence portion
ggucuggaaguccagagacuu

SEQ ID NO: 4552 - RNA, 21 nt, Artificial Sequence
  C3-targeting RNA guide sequence portion
ggugcauuuggguguuugugg

SEQ ID NO: 4553 - RNA, 21 nt, Artificial Sequence
  C3-targeting RNA guide sequence portion
ggugcucuaagauuugagguu

SEQ ID NO: 4554 - RNA, 21 nt, Artificial Sequence
  C3-targeting RNA guide sequence portion
gguggaagcagacauuugggg

SEQ ID NO: 4555 - RNA, 21 nt, Artificial Sequence
  C3-targeting RNA guide sequence portion
gguggaauuggaguuugggau

SEQ ID NO: 4556 - RNA, 21 nt, Artificial Sequence
  C3-targeting RNA guide sequence portion
gguggcagugcccagagaaga

SEQ ID NO: 4557 - RNA, 21 nt, Artificial Sequence
  C3-targeting RNA guide sequence portion
gguggcugcuguccugcccau

SEQ ID NO: 4558 - RNA, 21 nt, Artificial Sequence
  C3-targeting RNA guide sequence portion
ggugggauguguggcccccuc

SEQ ID NO: 4559 - RNA, 21 nt, Artificial Sequence
  C3-targeting RNA guide sequence portion
gguguaugugguguucauuga

SEQ ID NO: 4560 - RNA, 21 nt, Artificial Sequence
  C3-targeting RNA guide sequence portion
gguguccgggaguuugagugu

SEQ ID NO: 4561 - RNA, 21 nt, Artificial Sequence
  C3-targeting RNA guide sequence portion
gguguuggagguuuaggcugg

SEQ ID NO: 4562 - RNA, 21 nt, Artificial Sequence
  C3-targeting RNA guide sequence portion
gguguuuauggguuggguguu

SEQ ID NO: 4563 - RNA, 21 nt, Artificial Sequence
  C3-targeting RNA guide sequence portion
gguguuuguggaauccaggua

SEQ ID NO: 4564 - RNA, 21 nt, Artificial Sequence
  C3-targeting RNA guide sequence portion
gguguuuguggauucaggggu

SEQ ID NO: 4565 - RNA, 21 nt, Artificial Sequence
  C3-targeting RNA guide sequence portion
gguuagcagguugggaaugau

SEQ ID NO: 4566 - RNA, 21 nt, Artificial Sequence
  C3-targeting RNA guide sequence portion
gguuaugacucuacccacaaa

SEQ ID NO: 4567 - RNA, 21 nt, Artificial Sequence
  C3-targeting RNA guide sequence portion
gguucaggguuuggugggaug

SEQ ID NO: 4568 - RNA, 21 nt, Artificial Sequence
  C3-targeting RNA guide sequence portion
gguucauguauaguuggggca

SEQ ID NO: 4569 - RNA, 21 nt, Artificial Sequence
  C3-targeting RNA guide sequence portion
gguucugggguggaagcagac

SEQ ID NO: 4570 - RNA, 21 nt, Artificial Sequence
  C3-targeting RNA guide sequence portion
gguugagacgguggcagugcc

SEQ ID NO: 4571 - RNA, 21 nt, Artificial Sequence
  C3-targeting RNA guide sequence portion
gguuggaagguucaggguuug

SEQ ID NO: 4572 - RNA, 21 nt, Artificial Sequence
  C3-targeting RNA guide sequence portion
gguugggaaugauuauauaua

SEQ ID NO: 4573 - RNA, 21 nt, Artificial Sequence
  C3-targeting RNA guide sequence portion
gguuuaaagauuggcuacuuc

SEQ ID NO: 4574 - RNA, 21 nt, Artificial Sequence
  C3-targeting RNA guide sequence portion
gguuuagagguuuuggcguau

SEQ ID NO: 4575 - RNA, 21 nt, Artificial Sequence
  C3-targeting RNA guide sequence portion
gguuuaggcgauugugggucu

SEQ ID NO: 4576 - RNA, 21 nt, Artificial Sequence
  C3-targeting RNA guide sequence portion
gguuuaggcuggguuuggggu

SEQ ID NO: 4577 - RNA, 21 nt, Artificial Sequence
  C3-targeting RNA guide sequence portion
gguuuaggguguauguggugu

SEQ ID NO: 4578 - RNA, 21 nt, Artificial Sequence
  C3-targeting RNA guide sequence portion
gguuuaggguuuggggcaugu

SEQ ID NO: 4579 - RNA, 21 nt, Artificial Sequence
  C3-targeting RNA guide sequence portion
gguuuggacuuuacaagauuu

SEQ ID NO: 4580 - RNA, 21 nt, Artificial Sequence
  C3-targeting RNA guide sequence portion
gguuuggggcauguguggguu

SEQ ID NO: 4581 - RNA, 21 nt, Artificial Sequence
  C3-targeting RNA guide sequence portion
gguuuggggugcucuaagauu

SEQ ID NO: 4582 - RNA, 21 nt, Artificial Sequence
  C3-targeting RNA guide sequence portion
gguuuggguagguagaguuga

SEQ ID NO: 4583 - RNA, 21 nt, Artificial Sequence
  C3-targeting RNA guide sequence portion
gguuuggugggauguguggcc

SEQ ID NO: 4584 - RNA, 21 nt, Artificial Sequence
  C3-targeting RNA guide sequence portion
gguuuuggcguauguggguuu

SEQ ID NO: 4585 - RNA, 21 nt, Artificial Sequence
  C3-targeting RNA guide sequence portion
guaaacacucaaacucccgga

SEQ ID NO: 4586 - RNA, 21 nt, Artificial Sequence
  C3-targeting RNA guide sequence portion
guaaaguccaaaccuccgagu

SEQ ID NO: 4587 - RNA, 21 nt, Artificial Sequence
  C3-targeting RNA guide sequence portion
guagaauucagggugcauuug

SEQ ID NO: 4588 - RNA, 21 nt, Artificial Sequence
  C3-targeting RNA guide sequence portion
guagagguuuaggguuugggg

SEQ ID NO: 4589 - RNA, 21 nt, Artificial Sequence
  C3-targeting RNA guide sequence portion
guagaguugaggguguccggg

SEQ ID NO: 4590 - RNA, 21 nt, Artificial Sequence
  C3-targeting RNA guide sequence portion
guagccaaucuuuaaacccac

SEQ ID NO: 4591 - RNA, 21 nt, Artificial Sequence
  C3-targeting RNA guide sequence portion
guagguagaguugaggguguc

SEQ ID NO: 4592 - RNA, 21 nt, Artificial Sequence
  C3-targeting RNA guide sequence portion
guauaguuggggcauuuggaa

SEQ ID NO: 4593 - RNA, 21 nt, Artificial Sequence
  C3-targeting RNA guide sequence portion
guauauaaacuccaauuccac

SEQ ID NO: 4594 - RNA, 21 nt, Artificial Sequence
  C3-targeting RNA guide sequence portion
guauauaaacuccaauuccau

SEQ ID NO: 4595 - RNA, 21 nt, Artificial Sequence
  C3-targeting RNA guide sequence portion
guaucguggaauuggaguuua

SEQ ID NO: 4596 - RNA, 21 nt, Artificial Sequence
  C3-targeting RNA guide sequence portion
guaugguggaauuggaguuug

SEQ ID NO: 4597 - RNA, 21 nt, Artificial Sequence
  C3-targeting RNA guide sequence portion
guauguggguuuggguaggua

SEQ ID NO: 4598 - RNA, 21 nt, Artificial Sequence
  C3-targeting RNA guide sequence portion
guaugugguguucauugaugg

SEQ ID NO: 4599 - RNA, 21 nt, Artificial Sequence
  C3-targeting RNA guide sequence portion
guauuuauuaggacuggggug

SEQ ID NO: 4600 - RNA, 21 nt, Artificial Sequence
  C3-targeting RNA guide sequence portion
gucacuggauccucuccagga

SEQ ID NO: 4601 - RNA, 21 nt, Artificial Sequence
  C3-targeting RNA guide sequence portion
gucagcaacuccuccaagucu

SEQ ID NO: 4602 - RNA, 21 nt, Artificial Sequence
  C3-targeting RNA guide sequence portion
gucagcgccuggcaggcugug

SEQ ID NO: 4603 - RNA, 21 nt, Artificial Sequence
  C3-targeting RNA guide sequence portion
gucaucuguugguuuagggug

SEQ ID NO: 4604 - RNA, 21 nt, Artificial Sequence
  C3-targeting RNA guide sequence portion
gucaugguggcugcuguccug

SEQ ID NO: 4605 - RNA, 21 nt, Artificial Sequence
  C3-targeting RNA guide sequence portion
gucauuccacggaugugagac

SEQ ID NO: 4606 - RNA, 21 nt, Artificial Sequence
  C3-targeting RNA guide sequence portion
guccagagacuuggaggaguu

SEQ ID NO: 4607 - RNA, 21 nt, Artificial Sequence
  C3-targeting RNA guide sequence portion
guccaggucccuguagaauuc

SEQ ID NO: 4608 - RNA, 21 nt, Artificial Sequence
  C3-targeting RNA guide sequence portion
guccccaagcugcaaacuccc

SEQ ID NO: 4609 - RNA, 21 nt, Artificial Sequence
  C3-targeting RNA guide sequence portion
gucccuguagaauucagggug

SEQ ID NO: 4610 - RNA, 21 nt, Artificial Sequence
  C3-targeting RNA guide sequence portion
guccgggaguuugaguguuua

SEQ ID NO: 4611 - RNA, 21 nt, Artificial Sequence
  C3-targeting RNA guide sequence portion
guccucacuggagucagcgcc

SEQ ID NO: 4612 - RNA, 21 nt, Artificial Sequence
  C3-targeting RNA guide sequence portion
guccugcccaugugguugaga

SEQ ID NO: 4613 - RNA, 21 nt, Artificial Sequence
  C3-targeting RNA guide sequence portion
guccuggagaggauccaguga

SEQ ID NO: 4614 - RNA, 21 nt, Artificial Sequence
  C3-targeting RNA guide sequence portion
gucggaguggggcacgggagu

SEQ ID NO: 4615 - RNA, 21 nt, Artificial Sequence
  C3-targeting RNA guide sequence portion
gucucaaccacaugggcagga

SEQ ID NO: 4616 - RNA, 21 nt, Artificial Sequence
  C3-targeting RNA guide sequence portion
gucucacauccguggaaugac

SEQ ID NO: 4617 - RNA, 21 nt, Artificial Sequence
  C3-targeting RNA guide sequence portion
gucucuggacuuccagaccca

SEQ ID NO: 4618 - RNA, 21 nt, Artificial Sequence
  C3-targeting RNA guide sequence portion
gucugcuuccaccccagaacc

SEQ ID NO: 4619 - RNA, 21 nt, Artificial Sequence
  C3-targeting RNA guide sequence portion
gucuggaaguccagagacuug

SEQ ID NO: 4620 - RNA, 21 nt, Artificial Sequence
  C3-targeting RNA guide sequence portion
gugacugccggcgcacuugcc

SEQ ID NO: 4621 - RNA, 21 nt, Artificial Sequence
  C3-targeting RNA guide sequence portion
gugagacgccaguccucacug

SEQ ID NO: 4622 - RNA, 21 nt, Artificial Sequence
  C3-targeting RNA guide sequence portion
gugaggacuggcgucucacau

SEQ ID NO: 4623 - RNA, 21 nt, Artificial Sequence
  C3-targeting RNA guide sequence portion
gugagugguuaugacucuacc

SEQ ID NO: 4624 - RNA, 21 nt, Artificial Sequence
  C3-targeting RNA guide sequence portion
gugcauuuggguguuugugga

SEQ ID NO: 4625 - RNA, 21 nt, Artificial Sequence
  C3-targeting RNA guide sequence portion
gugcccagagaagauaauggc

SEQ ID NO: 4626 - RNA, 21 nt, Artificial Sequence
  C3-targeting RNA guide sequence portion
gugccccagccucugguccug

SEQ ID NO: 4627 - RNA, 21 nt, Artificial Sequence
  C3-targeting RNA guide sequence portion
gugcgccggcagucacuggau

SEQ ID NO: 4628 - RNA, 21 nt, Artificial Sequence
  C3-targeting RNA guide sequence portion
gugcucuaagauuugagguuu

SEQ ID NO: 4629 - RNA, 21 nt, Artificial Sequence
  C3-targeting RNA guide sequence portion
guggaagcagacauuuggggg

SEQ ID NO: 4630 - RNA, 21 nt, Artificial Sequence
  C3-targeting RNA guide sequence portion
guggaauccagguaucaugga

SEQ ID NO: 4631 - RNA, 21 nt, Artificial Sequence
  C3-targeting RNA guide sequence portion
guggaauccagguaucgugga

SEQ ID NO: 4632 - RNA, 21 nt, Artificial Sequence
  C3-targeting RNA guide sequence portion
guggaauccagguauggugga

SEQ ID NO: 4633 - RNA, 21 nt, Artificial Sequence
  C3-targeting RNA guide sequence portion
guggaaugacaagcccacucc

SEQ ID NO: 4634 - RNA, 21 nt, Artificial Sequence
  C3-targeting RNA guide sequence portion
guggaauuggaguuuauauac

SEQ ID NO: 4635 - RNA, 21 nt, Artificial Sequence
  C3-targeting RNA guide sequence portion
guggaauuggaguuugggaug

SEQ ID NO: 4636 - RNA, 21 nt, Artificial Sequence
  C3-targeting RNA guide sequence portion
guggauucagggguuagcagg

SEQ ID NO: 4637 - RNA, 21 nt, Artificial Sequence
  C3-targeting RNA guide sequence portion
guggcagugcccagagaagau

SEQ ID NO: 4638 - RNA, 21 nt, Artificial Sequence
  C3-targeting RNA guide sequence portion
guggcccccucguugcccagg

SEQ ID NO: 4639 - RNA, 21 nt, Artificial Sequence
  C3-targeting RNA guide sequence portion
guggcugcuguccugcccaug

SEQ ID NO: 4640 - RNA, 21 nt, Artificial Sequence
  C3-targeting RNA guide sequence portion
gugggagucaugguggcugcu

SEQ ID NO: 4641 - RNA, 21 nt, Artificial Sequence
  C3-targeting RNA guide sequence portion
gugggauguguggcccccucg

SEQ ID NO: 4642 - RNA, 21 nt, Artificial Sequence
  C3-targeting RNA guide sequence portion
gugggcuugucauuccacgga

SEQ ID NO: 4643 - RNA, 21 nt, Artificial Sequence
  C3-targeting RNA guide sequence portion
guggggcacgggagugggcuu

SEQ ID NO: 4644 - RNA, 21 nt, Artificial Sequence
  C3-targeting RNA guide sequence portion
gugggucuggaaguccagaga

SEQ ID NO: 4645 - RNA, 21 nt, Artificial Sequence
  C3-targeting RNA guide sequence portion
guggguuuaaagauuggcuac

SEQ ID NO: 4646 - RNA, 21 nt, Artificial Sequence
  C3-targeting RNA guide sequence portion
guggguuuaggcgauuguggg

SEQ ID NO: 4647 - RNA, 21 nt, Artificial Sequence
  C3-targeting RNA guide sequence portion
guggguuuggguagguagagu

SEQ ID NO: 4648 - RNA, 21 nt, Artificial Sequence
  C3-targeting RNA guide sequence portion
gugguguucauugauggugcg

SEQ ID NO: 4649 - RNA, 21 nt, Artificial Sequence
  C3-targeting RNA guide sequence portion
gugguuaugacucuacccaca

SEQ ID NO: 4650 - RNA, 21 nt, Artificial Sequence
  C3-targeting RNA guide sequence portion
gugguugagacgguggcagug

SEQ ID NO: 4651 - RNA, 21 nt, Artificial Sequence
  C3-targeting RNA guide sequence portion
guguaugugguguucauugau

SEQ ID NO: 4652 - RNA, 21 nt, Artificial Sequence
  C3-targeting RNA guide sequence portion
guguccgggaguuugaguguu

SEQ ID NO: 4653 - RNA, 21 nt, Artificial Sequence
  C3-targeting RNA guide sequence portion
gugugccccagccucuggucc

SEQ ID NO: 4654 - RNA, 21 nt, Artificial Sequence
  C3-targeting RNA guide sequence portion
guguggcccccucguugccca

SEQ ID NO: 4655 - RNA, 21 nt, Artificial Sequence
  C3-targeting RNA guide sequence portion
guguggguuuaaagauuggcu

SEQ ID NO: 4656 - RNA, 21 nt, Artificial Sequence
  C3-targeting RNA guide sequence portion
guguggguuuaggcgauugug

SEQ ID NO: 4657 - RNA, 21 nt, Artificial Sequence
  C3-targeting RNA guide sequence portion
guguuggagguuuaggcuggg

SEQ ID NO: 4658 - RNA, 21 nt, Artificial Sequence
  C3-targeting RNA guide sequence portion
guguuuacauauuuggagugu

SEQ ID NO: 4659 - RNA, 21 nt, Artificial Sequence
  C3-targeting RNA guide sequence portion
guguuuagagagguagagguu

SEQ ID NO: 4660 - RNA, 21 nt, Artificial Sequence
  C3-targeting RNA guide sequence portion
guguuuauggguuggguguuu

SEQ ID NO: 4661 - RNA, 21 nt, Artificial Sequence
  C3-targeting RNA guide sequence portion
guguuuguggaauccagguau

SEQ ID NO: 4662 - RNA, 21 nt, Artificial Sequence
  C3-targeting RNA guide sequence portion
guguuuguggauucagggguu

SEQ ID NO: 4663 - RNA, 21 nt, Artificial Sequence
  C3-targeting RNA guide sequence portion
guuagcagguugggaaugauu

SEQ ID NO: 4664 - RNA, 21 nt, Artificial Sequence
  C3-targeting RNA guide sequence portion
guuaugacucuacccacaaac

SEQ ID NO: 4665 - RNA, 21 nt, Artificial Sequence
  C3-targeting RNA guide sequence portion
guucaggguuuggugggaugu

SEQ ID NO: 4666 - RNA, 21 nt, Artificial Sequence
  C3-targeting RNA guide sequence portion
guucauguauaguuggggcau

SEQ ID NO: 4667 - RNA, 21 nt, Artificial Sequence
  C3-targeting RNA guide sequence portion
guucugggguggaagcagaca

SEQ ID NO: 4668 - RNA, 21 nt, Artificial Sequence
  C3-targeting RNA guide sequence portion
guugagacgguggcagugccc

SEQ ID NO: 4669 - RNA, 21 nt, Artificial Sequence
  C3-targeting RNA guide sequence portion
guugaggguguccgggaguuu

SEQ ID NO: 4670 - RNA, 21 nt, Artificial Sequence
  C3-targeting RNA guide sequence portion
guugcccaggcuuucaaaggc

SEQ ID NO: 4671 - RNA, 21 nt, Artificial Sequence
  C3-targeting RNA guide sequence portion
guugcugacgcugguuggaag

SEQ ID NO: 4672 - RNA, 21 nt, Artificial Sequence
  C3-targeting RNA guide sequence portion
guuggaagguucaggguuugg

SEQ ID NO: 4673 - RNA, 21 nt, Artificial Sequence
  C3-targeting RNA guide sequence portion
guuggagguuuaggcuggguu

SEQ ID NO: 4674 - RNA, 21 nt, Artificial Sequence
  C3-targeting RNA guide sequence portion
guugggaaugauuauauauau

SEQ ID NO: 4675 - RNA, 21 nt, Artificial Sequence
  C3-targeting RNA guide sequence portion
guuggggcauuuggaauugau

SEQ ID NO: 4676 - RNA, 21 nt, Artificial Sequence
  C3-targeting RNA guide sequence portion
guuggguguuuguggaaucca

SEQ ID NO: 4677 - RNA, 21 nt, Artificial Sequence
  C3-targeting RNA guide sequence portion
guugguuuaggguguaugugg

SEQ ID NO: 4678 - RNA, 21 nt, Artificial Sequence
  C3-targeting RNA guide sequence portion
guuuaaagauuggcuacuucg

SEQ ID NO: 4679 - RNA, 21 nt, Artificial Sequence
  C3-targeting RNA guide sequence portion
guuuacauauuuggaguguuu

SEQ ID NO: 4680 - RNA, 21 nt, Artificial Sequence
  C3-targeting RNA guide sequence portion
guuuagagagguagagguuua

SEQ ID NO: 4681 - RNA, 21 nt, Artificial Sequence
  C3-targeting RNA guide sequence portion
guuuagagguuuuggcguaug

SEQ ID NO: 4682 - RNA, 21 nt, Artificial Sequence
  C3-targeting RNA guide sequence portion
guuuaggcgauugugggucug

SEQ ID NO: 4683 - RNA, 21 nt, Artificial Sequence
  C3-targeting RNA guide sequence portion
guuuaggcuggguuuggggug

SEQ ID NO: 4684 - RNA, 21 nt, Artificial Sequence
  C3-targeting RNA guide sequence portion
guuuaggguguaugugguguu

SEQ ID NO: 4685 - RNA, 21 nt, Artificial Sequence
  C3-targeting RNA guide sequence portion
guuuaggguuuggggcaugug

SEQ ID NO: 4686 - RNA, 21 nt, Artificial Sequence
  C3-targeting RNA guide sequence portion
guuuauauacauuugggcugc

SEQ ID NO: 4687 - RNA, 21 nt, Artificial Sequence
  C3-targeting RNA guide sequence portion
guuuauggguuggguguuugu

SEQ ID NO: 4688 - RNA, 21 nt, Artificial Sequence
  C3-targeting RNA guide sequence portion
guuucuagaauugaggucauc

SEQ ID NO: 4689 - RNA, 21 nt, Artificial Sequence
  C3-targeting RNA guide sequence portion
guuugaguguuuacauauuug

SEQ ID NO: 4690 - RNA, 21 nt, Artificial Sequence
  C3-targeting RNA guide sequence portion
guuugcagcuuggggacuugc

SEQ ID NO: 4691 - RNA, 21 nt, Artificial Sequence
  C3-targeting RNA guide sequence portion
guuuggacuuuacaagauuug

SEQ ID NO: 4692 - RNA, 21 nt, Artificial Sequence
  C3-targeting RNA guide sequence portion
guuugggauguuucuagaauu

SEQ ID NO: 4693 - RNA, 21 nt, Artificial Sequence
  C3-targeting RNA guide sequence portion
guuuggggcauguguggguuu

SEQ ID NO: 4694 - RNA, 21 nt, Artificial Sequence
  C3-targeting RNA guide sequence portion
guuuggggugcucuaagauuu

SEQ ID NO: 4695 - RNA, 21 nt, Artificial Sequence
  C3-targeting RNA guide sequence portion
guuuggguagguagaguugag

SEQ ID NO: 4696 - RNA, 21 nt, Artificial Sequence
  C3-targeting RNA guide sequence portion
guuuggguguuuauggguugg

SEQ ID NO: 4697 - RNA, 21 nt, Artificial Sequence
  C3-targeting RNA guide sequence portion
guuuggugggauguguggccc

SEQ ID NO: 4698 - RNA, 21 nt, Artificial Sequence
  C3-targeting RNA guide sequence portion
guuuguggaauccagguauca

SEQ ID NO: 4699 - RNA, 21 nt, Artificial Sequence
  C3-targeting RNA guide sequence portion
guuuguggaauccagguaucg

SEQ ID NO: 4700 - RNA, 21 nt, Artificial Sequence
  C3-targeting RNA guide sequence portion
guuuguggaauccagguaugg

SEQ ID NO: 4701 - RNA, 21 nt, Artificial Sequence
  C3-targeting RNA guide sequence portion
guuuguggauucagggguuag

SEQ ID NO: 4702 - RNA, 21 nt, Artificial Sequence
  C3-targeting RNA guide sequence portion
guuuguggguagagucauaac

SEQ ID NO: 4703 - RNA, 21 nt, Artificial Sequence
  C3-targeting RNA guide sequence portion
guuuuggcguauguggguuug

SEQ ID NO: 4704 - RNA, 21 nt, Artificial Sequence
  C3-targeting RNA guide sequence portion
uaaacacccaaacucucaggc

SEQ ID NO: 4705 - RNA, 21 nt, Artificial Sequence
  C3-targeting RNA guide sequence portion
uaaacacucaaacucccggac

SEQ ID NO: 4706 - RNA, 21 nt, Artificial Sequence
  C3-targeting RNA guide sequence portion
uaaaccaacagaugaccucaa

SEQ ID NO: 4707 - RNA, 21 nt, Artificial Sequence
  C3-targeting RNA guide sequence portion
uaaacccacacaugccccaaa

SEQ ID NO: 4708 - RNA, 21 nt, Artificial Sequence
  C3-targeting RNA guide sequence portion
uaaacccacacugaaaauugc

SEQ ID NO: 4709 - RNA, 21 nt, Artificial Sequence
  C3-targeting RNA guide sequence portion
uaaaccucaaaucuuagagca

SEQ ID NO: 4710 - RNA, 21 nt, Artificial Sequence
  C3-targeting RNA guide sequence portion
uaaaccuccaacaccccaguc

SEQ ID NO: 4711 - RNA, 21 nt, Artificial Sequence
  C3-targeting RNA guide sequence portion
uaaaccucuaccucucuaaac

SEQ ID NO: 4712 - RNA, 21 nt, Artificial Sequence
  C3-targeting RNA guide sequence portion
uaaacuccaauuccacgauac

SEQ ID NO: 4713 - RNA, 21 nt, Artificial Sequence
  C3-targeting RNA guide sequence portion
uaaacuccaauuccaugauac

SEQ ID NO: 4714 - RNA, 21 nt, Artificial Sequence
  C3-targeting RNA guide sequence portion
uaaagauuggcuacuucgggu

SEQ ID NO: 4715 - RNA, 21 nt, Artificial Sequence
  C3-targeting RNA guide sequence portion
uaaauacaaucaauuccaaau

SEQ ID NO: 4716 - RNA, 21 nt, Artificial Sequence
  C3-targeting RNA guide sequence portion
uaaccccugaauccacaaaca

SEQ ID NO: 4717 - RNA, 21 nt, Artificial Sequence
  C3-targeting RNA guide sequence portion
uaagauuugagguuuagaggu

SEQ ID NO: 4718 - RNA, 21 nt, Artificial Sequence
  C3-targeting RNA guide sequence portion
uaaucauucccaaccugcuaa

SEQ ID NO: 4719 - RNA, 21 nt, Artificial Sequence
  C3-targeting RNA guide sequence portion
uaauggcauuggcaagugcgc

SEQ ID NO: 4720 - RNA, 21 nt, Artificial Sequence
  C3-targeting RNA guide sequence portion
uacaagauuugggaguuugca

SEQ ID NO: 4721 - RNA, 21 nt, Artificial Sequence
  C3-targeting RNA guide sequence portion
uacaaucaauuccaaaugccc

SEQ ID NO: 4722 - RNA, 21 nt, Artificial Sequence
  C3-targeting RNA guide sequence portion
uacacccuaaaccaacagaug

SEQ ID NO: 4723 - RNA, 21 nt, Artificial Sequence
  C3-targeting RNA guide sequence portion
uacagggaccuggacccccaa

SEQ ID NO: 4724 - RNA, 21 nt, Artificial Sequence
  C3-targeting RNA guide sequence portion
uacauauuuggaguguuuaga

SEQ ID NO: 4725 - RNA, 21 nt, Artificial Sequence
  C3-targeting RNA guide sequence portion
uacaugaacccgaaguagcca

SEQ ID NO: 4726 - RNA, 21 nt, Artificial Sequence
  C3-targeting RNA guide sequence portion
uacauuugggcugccugagag

SEQ ID NO: 4727 - RNA, 21 nt, Artificial Sequence
  C3-targeting RNA guide sequence portion
uacauuugggcugccugugag

SEQ ID NO: 4728 - RNA, 21 nt, Artificial Sequence
  C3-targeting RNA guide sequence portion
uacccaaacccacauacgcca

SEQ ID NO: 4729 - RNA, 21 nt, Artificial Sequence
  C3-targeting RNA guide sequence portion
uacccacaaacagggcugguu

SEQ ID NO: 4730 - RNA, 21 nt, Artificial Sequence
  C3-targeting RNA guide sequence portion
uaccuacccaaacccacauac

SEQ ID NO: 4731 - RNA, 21 nt, Artificial Sequence
  C3-targeting RNA guide sequence portion
uaccucucuaaacacuccaaa

SEQ ID NO: 4732 - RNA, 21 nt, Artificial Sequence
  C3-targeting RNA guide sequence portion
uaccuggauuccacaaacacc

SEQ ID NO: 4733 - RNA, 21 nt, Artificial Sequence
  C3-targeting RNA guide sequence portion
uacgccaaaaccucuaaaccu

SEQ ID NO: 4734 - RNA, 21 nt, Artificial Sequence
  C3-targeting RNA guide sequence portion
uacuucggguucauguauagu

SEQ ID NO: 4735 - RNA, 21 nt, Artificial Sequence
  C3-targeting RNA guide sequence portion
uagaaacaucccaaacuccaa

SEQ ID NO: 4736 - RNA, 21 nt, Artificial Sequence
  C3-targeting RNA guide sequence portion
uagaauucagggugcauuugg

SEQ ID NO: 4737 - RNA, 21 nt, Artificial Sequence
  C3-targeting RNA guide sequence portion
uagaauugaggucaucuguug

SEQ ID NO: 4738 - RNA, 21 nt, Artificial Sequence
  C3-targeting RNA guide sequence portion
uagagagguagagguuuaggg

SEQ ID NO: 4739 - RNA, 21 nt, Artificial Sequence
  C3-targeting RNA guide sequence portion
uagagcaccccaaacccagcc

SEQ ID NO: 4740 - RNA, 21 nt, Artificial Sequence
  C3-targeting RNA guide sequence portion
uagagguuuaggguuuggggc

SEQ ID NO: 4741 - RNA, 21 nt, Artificial Sequence
  C3-targeting RNA guide sequence portion
uagagguuuuggcguaugugg

SEQ ID NO: 4742 - RNA, 21 nt, Artificial Sequence
  C3-targeting RNA guide sequence portion
uagaguugaggguguccggga

SEQ ID NO: 4743 - RNA, 21 nt, Artificial Sequence
  C3-targeting RNA guide sequence portion
uagccaaucuuuaaacccaca

SEQ ID NO: 4744 - RNA, 21 nt, Artificial Sequence
  C3-targeting RNA guide sequence portion
uaggacugggguguuggaggu

SEQ ID NO: 4745 - RNA, 21 nt, Artificial Sequence
  C3-targeting RNA guide sequence portion
uaggcgauugugggucuggaa

SEQ ID NO: 4746 - RNA, 21 nt, Artificial Sequence
  C3-targeting RNA guide sequence portion
uaggcuggguuuggggugcuc

SEQ ID NO: 4747 - RNA, 21 nt, Artificial Sequence
  C3-targeting RNA guide sequence portion
uaggguguaugugguguucau

SEQ ID NO: 4748 - RNA, 21 nt, Artificial Sequence
  C3-targeting RNA guide sequence portion
uaggguuuggggcaugugugg

SEQ ID NO: 4749 - RNA, 21 nt, Artificial Sequence
  C3-targeting RNA guide sequence portion
uagguagaguugagggugucc

SEQ ID NO: 4750 - RNA, 21 nt, Artificial Sequence
  C3-targeting RNA guide sequence portion
uaguuggggcauuuggaauug

SEQ ID NO: 4751 - RNA, 21 nt, Artificial Sequence
  C3-targeting RNA guide sequence portion
uauaaacuccaauuccacgau

SEQ ID NO: 4752 - RNA, 21 nt, Artificial Sequence
  C3-targeting RNA guide sequence portion
uauaaacuccaauuccaugau

SEQ ID NO: 4753 - RNA, 21 nt, Artificial Sequence
  C3-targeting RNA guide sequence portion
uauaaucauucccaaccugcu

SEQ ID NO: 4754 - RNA, 21 nt, Artificial Sequence
  C3-targeting RNA guide sequence portion
uauacaugaacccgaaguagc

SEQ ID NO: 4755 - RNA, 21 nt, Artificial Sequence
  C3-targeting RNA guide sequence portion
uauacauuugggcugccugag

SEQ ID NO: 4756 - RNA, 21 nt, Artificial Sequence
  C3-targeting RNA guide sequence portion
uauacauuugggcugccugug

SEQ ID NO: 4757 - RNA, 21 nt, Artificial Sequence
  C3-targeting RNA guide sequence portion
uauaguuggggcauuuggaau

SEQ ID NO: 4758 - RNA, 21 nt, Artificial Sequence
  C3-targeting RNA guide sequence portion
uauauaaacuccaauuccacg

SEQ ID NO: 4759 - RNA, 21 nt, Artificial Sequence
  C3-targeting RNA guide sequence portion
uauauaaucauucccaaccug

SEQ ID NO: 4760 - RNA, 21 nt, Artificial Sequence
  C3-targeting RNA guide sequence portion
uauauacauuugggcugccug

SEQ ID NO: 4761 - RNA, 21 nt, Artificial Sequence
  C3-targeting RNA guide sequence portion
uauauauauuugggcugccug

SEQ ID NO: 4762 - RNA, 21 nt, Artificial Sequence
  C3-targeting RNA guide sequence portion
uauauauuugggcugccugug

SEQ ID NO: 4763 - RNA, 21 nt, Artificial Sequence
  C3-targeting RNA guide sequence portion
uauauuugggcugccugugag

SEQ ID NO: 4764 - RNA, 21 nt, Artificial Sequence
  C3-targeting RNA guide sequence portion
uaucuucucugggcacugcca

SEQ ID NO: 4765 - RNA, 21 nt, Artificial Sequence
  C3-targeting RNA guide sequence portion
uaugacucuacccacaaacag

SEQ ID NO: 4766 - RNA, 21 nt, Artificial Sequence
  C3-targeting RNA guide sequence portion
uauggguuggguguuugugga

SEQ ID NO: 4767 - RNA, 21 nt, Artificial Sequence
  C3-targeting RNA guide sequence portion
uaugguggaauuggaguuugg

SEQ ID NO: 4768 - RNA, 21 nt, Artificial Sequence
  C3-targeting RNA guide sequence portion
uauguaaacacucaaacuccc

SEQ ID NO: 4769 - RNA, 21 nt, Artificial Sequence
  C3-targeting RNA guide sequence portion
uauguggguuuggguagguag

SEQ ID NO: 4770 - RNA, 21 nt, Artificial Sequence
  C3-targeting RNA guide sequence portion
uaugugguguucauugauggu

SEQ ID NO: 4771 - RNA, 21 nt, Artificial Sequence
  C3-targeting RNA guide sequence portion
uauuaggacugggguguugga

SEQ ID NO: 4772 - RNA, 21 nt, Artificial Sequence
  C3-targeting RNA guide sequence portion
uauuuauuaggacuggggugu

SEQ ID NO: 4773 - RNA, 21 nt, Artificial Sequence
  C3-targeting RNA guide sequence portion
uauuuggaguguuuagagagg

SEQ ID NO: 4774 - RNA, 21 nt, Artificial Sequence
  C3-targeting RNA guide sequence portion
uauuugggcugccugugaguu

SEQ ID NO: 4775 - RNA, 21 nt, Artificial Sequence
  C3-targeting RNA guide sequence portion
ucaaacucccggacacccuca

SEQ ID NO: 4776 - RNA, 21 nt, Artificial Sequence
  C3-targeting RNA guide sequence portion
ucaaaggccaggcccagcugg

SEQ ID NO: 4777 - RNA, 21 nt, Artificial Sequence
  C3-targeting RNA guide sequence portion
ucaaaucuuagagcaccccaa

SEQ ID NO: 4778 - RNA, 21 nt, Artificial Sequence
  C3-targeting RNA guide sequence portion
ucaaccacaugggcaggacag

SEQ ID NO: 4779 - RNA, 21 nt, Artificial Sequence
  C3-targeting RNA guide sequence portion
ucaacucuaccuacccaaacc

SEQ ID NO: 4780 - RNA, 21 nt, Artificial Sequence
  C3-targeting RNA guide sequence portion
ucaaugaacaccacauacacc

SEQ ID NO: 4781 - RNA, 21 nt, Artificial Sequence
  C3-targeting RNA guide sequence portion
ucaauuccaaaugccccaacu

SEQ ID NO: 4782 - RNA, 21 nt, Artificial Sequence
  C3-targeting RNA guide sequence portion
ucaauucuagaaacaucccaa

SEQ ID NO: 4783 - RNA, 21 nt, Artificial Sequence
  C3-targeting RNA guide sequence portion
ucacaggcagcccaaauauau

SEQ ID NO: 4784 - RNA, 21 nt, Artificial Sequence
  C3-targeting RNA guide sequence portion
ucacaggcagcccaaauguau

SEQ ID NO: 4785 - RNA, 21 nt, Artificial Sequence
  C3-targeting RNA guide sequence portion
ucacauccguggaaugacaag

SEQ ID NO: 4786 - RNA, 21 nt, Artificial Sequence
  C3-targeting RNA guide sequence portion
ucacuggagucagcgccuggc

SEQ ID NO: 4787 - RNA, 21 nt, Artificial Sequence
  C3-targeting RNA guide sequence portion
ucacuggauccucuccaggac

SEQ ID NO: 4788 - RNA, 21 nt, Artificial Sequence
  C3-targeting RNA guide sequence portion
ucagcaacuccuccaagucuc

SEQ ID NO: 4789 - RNA, 21 nt, Artificial Sequence
  C3-targeting RNA guide sequence portion
ucagccagcugggccuggccu

SEQ ID NO: 4790 - RNA, 21 nt, Artificial Sequence
  C3-targeting RNA guide sequence portion
ucagcgccuggcaggcugugu

SEQ ID NO: 4791 - RNA, 21 nt, Artificial Sequence
  C3-targeting RNA guide sequence portion
ucaggcagcccaaauguauau

SEQ ID NO: 4792 - RNA, 21 nt, Artificial Sequence
  C3-targeting RNA guide sequence portion
ucagggguuagcagguuggga

SEQ ID NO: 4793 - RNA, 21 nt, Artificial Sequence
  C3-targeting RNA guide sequence portion
ucagggugcauuuggguguuu

SEQ ID NO: 4794 - RNA, 21 nt, Artificial Sequence
  C3-targeting RNA guide sequence portion
ucaggguuuggugggaugugu

SEQ ID NO: 4795 - RNA, 21 nt, Artificial Sequence
  C3-targeting RNA guide sequence portion
ucaguguggguuuaaagauug

SEQ ID NO: 4796 - RNA, 21 nt, Artificial Sequence
  C3-targeting RNA guide sequence portion
ucaucuguugguuuagggugu

SEQ ID NO: 4797 - RNA, 21 nt, Artificial Sequence
  C3-targeting RNA guide sequence portion
ucaugguggcugcuguccugc

SEQ ID NO: 4798 - RNA, 21 nt, Artificial Sequence
  C3-targeting RNA guide sequence portion
ucauguauaguuggggcauuu

SEQ ID NO: 4799 - RNA, 21 nt, Artificial Sequence
  C3-targeting RNA guide sequence portion
ucauuccacggaugugagacg

SEQ ID NO: 4800 - RNA, 21 nt, Artificial Sequence
  C3-targeting RNA guide sequence portion
ucauucccaaccugcuaaccc

SEQ ID NO: 4801 - RNA, 21 nt, Artificial Sequence
  C3-targeting RNA guide sequence portion
uccaaauauguaaacacucaa

SEQ ID NO: 4802 - RNA, 21 nt, Artificial Sequence
  C3-targeting RNA guide sequence portion
uccaaaugccccaacuauaca

SEQ ID NO: 4803 - RNA, 21 nt, Artificial Sequence
  C3-targeting RNA guide sequence portion
uccaacaccccaguccuaaua

SEQ ID NO: 4804 - RNA, 21 nt, Artificial Sequence
  C3-targeting RNA guide sequence portion
uccaaccagcgucagcaacuc

SEQ ID NO: 4805 - RNA, 21 nt, Artificial Sequence
  C3-targeting RNA guide sequence portion
uccaagucucuggacuuccag

SEQ ID NO: 4806 - RNA, 21 nt, Artificial Sequence
  C3-targeting RNA guide sequence portion
uccaauuccaccauaccugga

SEQ ID NO: 4807 - RNA, 21 nt, Artificial Sequence
  C3-targeting RNA guide sequence portion
uccaauuccacgauaccugga

SEQ ID NO: 4808 - RNA, 21 nt, Artificial Sequence
  C3-targeting RNA guide sequence portion
uccaauuccaugauaccugga

SEQ ID NO: 4809 - RNA, 21 nt, Artificial Sequence
  C3-targeting RNA guide sequence portion
uccacaaacacccaaaugcac

SEQ ID NO: 4810 - RNA, 21 nt, Artificial Sequence
  C3-targeting RNA guide sequence portion
uccacaaacacccaacccaua

SEQ ID NO: 4811 - RNA, 21 nt, Artificial Sequence
  C3-targeting RNA guide sequence portion
uccaccauaccuggauuccac

SEQ ID NO: 4812 - RNA, 21 nt, Artificial Sequence
  C3-targeting RNA guide sequence portion
uccaccccagaaccagcccug

SEQ ID NO: 4813 - RNA, 21 nt, Artificial Sequence
  C3-targeting RNA guide sequence portion
uccacgauaccuggauuccac

SEQ ID NO: 4814 - RNA, 21 nt, Artificial Sequence
  C3-targeting RNA guide sequence portion
uccacggaugugagacgccag

SEQ ID NO: 4815 - RNA, 21 nt, Artificial Sequence
  C3-targeting RNA guide sequence portion
uccagacccacaaucgccuaa

SEQ ID NO: 4816 - RNA, 21 nt, Artificial Sequence
  C3-targeting RNA guide sequence portion
uccagagacuuggaggaguug

SEQ ID NO: 4817 - RNA, 21 nt, Artificial Sequence
  C3-targeting RNA guide sequence portion
uccaggaccagaggcuggggc

SEQ ID NO: 4818 - RNA, 21 nt, Artificial Sequence
  C3-targeting RNA guide sequence portion
uccagguaucauggaauugga

SEQ ID NO: 4819 - RNA, 21 nt, Artificial Sequence
  C3-targeting RNA guide sequence portion
uccagguaucguggaauugga

SEQ ID NO: 4820 - RNA, 21 nt, Artificial Sequence
  C3-targeting RNA guide sequence portion
uccagguaugguggaauugga

SEQ ID NO: 4821 - RNA, 21 nt, Artificial Sequence
  C3-targeting RNA guide sequence portion
uccaggucccuguagaauuca

SEQ ID NO: 4822 - RNA, 21 nt, Artificial Sequence
  C3-targeting RNA guide sequence portion
uccagugacugccggcgcacu

SEQ ID NO: 4823 - RNA, 21 nt, Artificial Sequence
  C3-targeting RNA guide sequence portion
uccagugaggacuggcgucuc

SEQ ID NO: 4824 - RNA, 21 nt, Artificial Sequence
  C3-targeting RNA guide sequence portion
uccaugauaccuggauuccac

SEQ ID NO: 4825 - RNA, 21 nt, Artificial Sequence
  C3-targeting RNA guide sequence portion
ucccaaacuccaauuccacca

SEQ ID NO: 4826 - RNA, 21 nt, Artificial Sequence
  C3-targeting RNA guide sequence portion
ucccaaaucuuguaaagucca

SEQ ID NO: 4827 - RNA, 21 nt, Artificial Sequence
  C3-targeting RNA guide sequence portion
ucccaaccugcuaaccccuga

SEQ ID NO: 4828 - RNA, 21 nt, Artificial Sequence
  C3-targeting RNA guide sequence portion
ucccaccaaacccugaaccuu

SEQ ID NO: 4829 - RNA, 21 nt, Artificial Sequence
  C3-targeting RNA guide sequence portion
ucccacucucagccagcuggg

SEQ ID NO: 4830 - RNA, 21 nt, Artificial Sequence
  C3-targeting RNA guide sequence portion
uccccaagcugcaaacuccca

SEQ ID NO: 4831 - RNA, 21 nt, Artificial Sequence
  C3-targeting RNA guide sequence portion
ucccggacacccucaacucua

SEQ ID NO: 4832 - RNA, 21 nt, Artificial Sequence
  C3-targeting RNA guide sequence portion
ucccuguagaauucagggugc

SEQ ID NO: 4833 - RNA, 21 nt, Artificial Sequence
  C3-targeting RNA guide sequence portion
uccgggaguuugaguguuuac

SEQ ID NO: 4834 - RNA, 21 nt, Artificial Sequence
  C3-targeting RNA guide sequence portion
uccguggaaugacaagcccac

SEQ ID NO: 4835 - RNA, 21 nt, Artificial Sequence
  C3-targeting RNA guide sequence portion
uccucacuggagucagcgccu

SEQ ID NO: 4836 - RNA, 21 nt, Artificial Sequence
  C3-targeting RNA guide sequence portion
uccuccaagucucuggacuuc

SEQ ID NO: 4837 - RNA, 21 nt, Artificial Sequence
  C3-targeting RNA guide sequence portion
uccucuccaggaccagaggcu

SEQ ID NO: 4838 - RNA, 21 nt, Artificial Sequence
  C3-targeting RNA guide sequence portion
uccugcccaugugguugagac

SEQ ID NO: 4839 - RNA, 21 nt, Artificial Sequence
  C3-targeting RNA guide sequence portion
uccuggagaggauccagugac

SEQ ID NO: 4840 - RNA, 21 nt, Artificial Sequence
  C3-targeting RNA guide sequence portion
ucgccuaaacccacacaugcc

SEQ ID NO: 4841 - RNA, 21 nt, Artificial Sequence
  C3-targeting RNA guide sequence portion
ucggagguuuggacuuuacaa

SEQ ID NO: 4842 - RNA, 21 nt, Artificial Sequence
  C3-targeting RNA guide sequence portion
ucggaguggggcacgggagug

SEQ ID NO: 4843 - RNA, 21 nt, Artificial Sequence
  C3-targeting RNA guide sequence portion
ucggguucauguauaguuggg

SEQ ID NO: 4844 - RNA, 21 nt, Artificial Sequence
  C3-targeting RNA guide sequence portion
ucguugcccaggcuuucaaag

SEQ ID NO: 4845 - RNA, 21 nt, Artificial Sequence
  C3-targeting RNA guide sequence portion
ucuaaaccucaaaucuuagag

SEQ ID NO: 4846 - RNA, 21 nt, Artificial Sequence
  C3-targeting RNA guide sequence portion
ucuaagauuugagguuuagag

SEQ ID NO: 4847 - RNA, 21 nt, Artificial Sequence
  C3-targeting RNA guide sequence portion
ucuacagggaccuggaccccc

SEQ ID NO: 4848 - RNA, 21 nt, Artificial Sequence
  C3-targeting RNA guide sequence portion
ucuacccacaaacagggcugg

SEQ ID NO: 4849 - RNA, 21 nt, Artificial Sequence
  C3-targeting RNA guide sequence portion
ucuaccuacccaaacccacau

SEQ ID NO: 4850 - RNA, 21 nt, Artificial Sequence
  C3-targeting RNA guide sequence portion
ucuaccucucuaaacacucca

SEQ ID NO: 4851 - RNA, 21 nt, Artificial Sequence
  C3-targeting RNA guide sequence portion
ucuagaaacaucccaaacucc

SEQ ID NO: 4852 - RNA, 21 nt, Artificial Sequence
  C3-targeting RNA guide sequence portion
ucuagaauugaggucaucugu

SEQ ID NO: 4853 - RNA, 21 nt, Artificial Sequence
  C3-targeting RNA guide sequence portion
ucucaaccacaugggcaggac

SEQ ID NO: 4854 - RNA, 21 nt, Artificial Sequence
  C3-targeting RNA guide sequence portion
ucucacauccguggaaugaca

SEQ ID NO: 4855 - RNA, 21 nt, Artificial Sequence
  C3-targeting RNA guide sequence portion
ucucagccagcugggccuggc

SEQ ID NO: 4856 - RNA, 21 nt, Artificial Sequence
  C3-targeting RNA guide sequence portion
ucucaggcagcccaaauguau

SEQ ID NO: 4857 - RNA, 21 nt, Artificial Sequence
  C3-targeting RNA guide sequence portion
ucuccaggaccagaggcuggg

SEQ ID NO: 4858 - RNA, 21 nt, Artificial Sequence
  C3-targeting RNA guide sequence portion
ucucuggacuuccagacccac

SEQ ID NO: 4859 - RNA, 21 nt, Artificial Sequence
  C3-targeting RNA guide sequence portion
ucucugggcacugccaccguc

SEQ ID NO: 4860 - RNA, 21 nt, Artificial Sequence
  C3-targeting RNA guide sequence portion
ucugcuuccaccccagaacca

SEQ ID NO: 4861 - RNA, 21 nt, Artificial Sequence
  C3-targeting RNA guide sequence portion
ucuggaaguccagagacuugg

SEQ ID NO: 4862 - RNA, 21 nt, Artificial Sequence
  C3-targeting RNA guide sequence portion
ucuggacuuccagacccacaa

SEQ ID NO: 4863 - RNA, 21 nt, Artificial Sequence
  C3-targeting RNA guide sequence portion
ucugggcacugccaccgucuc

SEQ ID NO: 4864 - RNA, 21 nt, Artificial Sequence
  C3-targeting RNA guide sequence portion
ucugggguggaagcagacauu

SEQ ID NO: 4865 - RNA, 21 nt, Artificial Sequence
  C3-targeting RNA guide sequence portion
ucugguccuggagaggaucca

SEQ ID NO: 4866 - RNA, 21 nt, Artificial Sequence
  C3-targeting RNA guide sequence portion
ucuguugguuuaggguguaug

SEQ ID NO: 4867 - RNA, 21 nt, Artificial Sequence
  C3-targeting RNA guide sequence portion
ucuuagagcaccccaaaccca

SEQ ID NO: 4868 - RNA, 21 nt, Artificial Sequence
  C3-targeting RNA guide sequence portion
ucuucucugggcacugccacc

SEQ ID NO: 4869 - RNA, 21 nt, Artificial Sequence
  C3-targeting RNA guide sequence portion
ucuuguaaaguccaaaccucc

SEQ ID NO: 4870 - RNA, 21 nt, Artificial Sequence
  C3-targeting RNA guide sequence portion
ucuuuaaacccacacugaaaa

SEQ ID NO: 4871 - RNA, 21 nt, Artificial Sequence
  C3-targeting RNA guide sequence portion
ugaaaauugcaaguccccaag

SEQ ID NO: 4872 - RNA, 21 nt, Artificial Sequence
  C3-targeting RNA guide sequence portion
ugaaagccugggcaacgaggg

SEQ ID NO: 4873 - RNA, 21 nt, Artificial Sequence
  C3-targeting RNA guide sequence portion
ugaacaccacauacacccuaa

SEQ ID NO: 4874 - RNA, 21 nt, Artificial Sequence
  C3-targeting RNA guide sequence portion
ugaacccgaaguagccaaucu

SEQ ID NO: 4875 - RNA, 21 nt, Artificial Sequence
  C3-targeting RNA guide sequence portion
ugaaccuuccaaccagcguca

SEQ ID NO: 4876 - RNA, 21 nt, Artificial Sequence
  C3-targeting RNA guide sequence portion
ugaauccacaaacacccaaau

SEQ ID NO: 4877 - RNA, 21 nt, Artificial Sequence
  C3-targeting RNA guide sequence portion
ugaauucuacagggaccugga

SEQ ID NO: 4878 - RNA, 21 nt, Artificial Sequence
  C3-targeting RNA guide sequence portion
ugacaagcccacucccgugcc

SEQ ID NO: 4879 - RNA, 21 nt, Artificial Sequence
  C3-targeting RNA guide sequence portion
ugaccucaauucuagaaacau

SEQ ID NO: 4880 - RNA, 21 nt, Artificial Sequence
  C3-targeting RNA guide sequence portion
ugacgcugguuggaagguuca

SEQ ID NO: 4881 - RNA, 21 nt, Artificial Sequence
  C3-targeting RNA guide sequence portion
ugacuccagugaggacuggcg

SEQ ID NO: 4882 - RNA, 21 nt, Artificial Sequence
  C3-targeting RNA guide sequence portion
ugacucccacucucagccagc

SEQ ID NO: 4883 - RNA, 21 nt, Artificial Sequence
  C3-targeting RNA guide sequence portion
ugacucuacccacaaacaggg

SEQ ID NO: 4884 - RNA, 21 nt, Artificial Sequence
  C3-targeting RNA guide sequence portion
ugacugccggcgcacuugcca

SEQ ID NO: 4885 - RNA, 21 nt, Artificial Sequence
  C3-targeting RNA guide sequence portion
ugagacgccaguccucacugg

SEQ ID NO: 4886 - RNA, 21 nt, Artificial Sequence
  C3-targeting RNA guide sequence portion
ugagacgguggcagugcccag

SEQ ID NO: 4887 - RNA, 21 nt, Artificial Sequence
  C3-targeting RNA guide sequence portion
ugagagugggagucauggugg

SEQ ID NO: 4888 - RNA, 21 nt, Artificial Sequence
  C3-targeting RNA guide sequence portion
ugagaguuuggguguuuaugg

SEQ ID NO: 4889 - RNA, 21 nt, Artificial Sequence
  C3-targeting RNA guide sequence portion
ugaggacuggcgucucacauc

SEQ ID NO: 4890 - RNA, 21 nt, Artificial Sequence
  C3-targeting RNA guide sequence portion
ugaggguguccgggaguuuga

SEQ ID NO: 4891 - RNA, 21 nt, Artificial Sequence
  C3-targeting RNA guide sequence portion
ugaggucaucuguugguuuag

SEQ ID NO: 4892 - RNA, 21 nt, Artificial Sequence
  C3-targeting RNA guide sequence portion
ugagguuuagagguuuuggcg

SEQ ID NO: 4893 - RNA, 21 nt, Artificial Sequence
  C3-targeting RNA guide sequence portion
ugagugguuaugacucuaccc

SEQ ID NO: 4894 - RNA, 21 nt, Artificial Sequence
  C3-targeting RNA guide sequence portion
ugauaccuggauuccacaaac

SEQ ID NO: 4895 - RNA, 21 nt, Artificial Sequence
  C3-targeting RNA guide sequence portion
ugauuauauauauuugggcug

SEQ ID NO: 4896 - RNA, 21 nt, Artificial Sequence
  C3-targeting RNA guide sequence portion
ugauuguauuuauuaggacug

SEQ ID NO: 4897 - RNA, 21 nt, Artificial Sequence
  C3-targeting RNA guide sequence portion
ugcaaacucccaaaucuugua

SEQ ID NO: 4898 - RNA, 21 nt, Artificial Sequence
  C3-targeting RNA guide sequence portion
ugcaaguccccaagcugcaaa

SEQ ID NO: 4899 - RNA, 21 nt, Artificial Sequence
  C3-targeting RNA guide sequence portion
ugcaauuuucaguguggguuu

SEQ ID NO: 4900 - RNA, 21 nt, Artificial Sequence
  C3-targeting RNA guide sequence portion
ugcacccugaauucuacaggg

SEQ ID NO: 4901 - RNA, 21 nt, Artificial Sequence
  C3-targeting RNA guide sequence portion
ugcagcuuggggacuugcaau

SEQ ID NO: 4902 - RNA, 21 nt, Artificial Sequence
  C3-targeting RNA guide sequence portion
ugcauuuggguguuuguggau

SEQ ID NO: 4903 - RNA, 21 nt, Artificial Sequence
  C3-targeting RNA guide sequence portion
ugccaaugccauuaucuucuc

SEQ ID NO: 4904 - RNA, 21 nt, Artificial Sequence
  C3-targeting RNA guide sequence portion
ugccaccgucucaaccacaug

SEQ ID NO: 4905 - RNA, 21 nt, Artificial Sequence
  C3-targeting RNA guide sequence portion
ugccaggcgcugacuccagug

SEQ ID NO: 4906 - RNA, 21 nt, Artificial Sequence
  C3-targeting RNA guide sequence portion
ugccauuaucuucucugggca

SEQ ID NO: 4907 - RNA, 21 nt, Artificial Sequence
  C3-targeting RNA guide sequence portion
ugcccagagaagauaauggca

SEQ ID NO: 4908 - RNA, 21 nt, Artificial Sequence
  C3-targeting RNA guide sequence portion
ugcccaggcuuucaaaggcca

SEQ ID NO: 4909 - RNA, 21 nt, Artificial Sequence
  C3-targeting RNA guide sequence portion
ugcccaugugguugagacggu

SEQ ID NO: 4910 - RNA, 21 nt, Artificial Sequence
  C3-targeting RNA guide sequence portion
ugccccaaacccuaaaccucu

SEQ ID NO: 4911 - RNA, 21 nt, Artificial Sequence
  C3-targeting RNA guide sequence portion
ugccccaacuauacaugaacc

SEQ ID NO: 4912 - RNA, 21 nt, Artificial Sequence
  C3-targeting RNA guide sequence portion
ugccccagccucugguccugg

SEQ ID NO: 4913 - RNA, 21 nt, Artificial Sequence
  C3-targeting RNA guide sequence portion
ugccggcgcacuugccaaugc

SEQ ID NO: 4914 - RNA, 21 nt, Artificial Sequence
  C3-targeting RNA guide sequence portion
ugccugagaguuuggguguuu

SEQ ID NO: 4915 - RNA, 21 nt, Artificial Sequence
  C3-targeting RNA guide sequence portion
ugcgccggcagucacuggauc

SEQ ID NO: 4916 - RNA, 21 nt, Artificial Sequence
  C3-targeting RNA guide sequence portion
ugcuaaccccugaauccacaa

SEQ ID NO: 4917 - RNA, 21 nt, Artificial Sequence
  C3-targeting RNA guide sequence portion
ugcucuaagauuugagguuua

SEQ ID NO: 4918 - RNA, 21 nt, Artificial Sequence
  C3-targeting RNA guide sequence portion
ugcugacgcugguuggaaggu

SEQ ID NO: 4919 - RNA, 21 nt, Artificial Sequence
  C3-targeting RNA guide sequence portion
ugcuguccugcccaugugguu

SEQ ID NO: 4920 - RNA, 21 nt, Artificial Sequence
  C3-targeting RNA guide sequence portion
ugcuuccaccccagaaccagc

SEQ ID NO: 4921 - RNA, 21 nt, Artificial Sequence
  C3-targeting RNA guide sequence portion
uggaagcagacauuugggggu

SEQ ID NO: 4922 - RNA, 21 nt, Artificial Sequence
  C3-targeting RNA guide sequence portion
uggaagguucaggguuuggug

SEQ ID NO: 4923 - RNA, 21 nt, Artificial Sequence
  C3-targeting RNA guide sequence portion
uggaaguccagagacuuggag

SEQ ID NO: 4924 - RNA, 21 nt, Artificial Sequence
  C3-targeting RNA guide sequence portion
uggaauccagguaucauggaa

SEQ ID NO: 4925 - RNA, 21 nt, Artificial Sequence
  C3-targeting RNA guide sequence portion
uggaauccagguaucguggaa

SEQ ID NO: 4926 - RNA, 21 nt, Artificial Sequence
  C3-targeting RNA guide sequence portion
uggaauccagguaugguggaa

SEQ ID NO: 4927 - RNA, 21 nt, Artificial Sequence
  C3-targeting RNA guide sequence portion
uggaaugacaagcccacuccc

SEQ ID NO: 4928 - RNA, 21 nt, Artificial Sequence
  C3-targeting RNA guide sequence portion
uggaauuggaguuugggaugu

SEQ ID NO: 4929 - RNA, 21 nt, Artificial Sequence
  C3-targeting RNA guide sequence portion
uggacccccaaaugucugcuu

SEQ ID NO: 4930 - RNA, 21 nt, Artificial Sequence
  C3-targeting RNA guide sequence portion
uggacuuccagacccacaauc

SEQ ID NO: 4931 - RNA, 21 nt, Artificial Sequence
  C3-targeting RNA guide sequence portion
uggacuuuacaagauuuggga

SEQ ID NO: 4932 - RNA, 21 nt, Artificial Sequence
  C3-targeting RNA guide sequence portion
uggagacucggagguuuggac

SEQ ID NO: 4933 - RNA, 21 nt, Artificial Sequence
  C3-targeting RNA guide sequence portion
uggagaggauccagugacugc

SEQ ID NO: 4934 - RNA, 21 nt, Artificial Sequence
  C3-targeting RNA guide sequence portion
uggaggaguugcugacgcugg

SEQ ID NO: 4935 - RNA, 21 nt, Artificial Sequence
  C3-targeting RNA guide sequence portion
uggagguuuaggcuggguuug

SEQ ID NO: 4936 - RNA, 21 nt, Artificial Sequence
  C3-targeting RNA guide sequence portion
uggagucagcgccuggcaggc

SEQ ID NO: 4937 - RNA, 21 nt, Artificial Sequence
  C3-targeting RNA guide sequence portion
uggaguguuuagagagguaga

SEQ ID NO: 4938 - RNA, 21 nt, Artificial Sequence
  C3-targeting RNA guide sequence portion
uggaguuugggauguuucuag

SEQ ID NO: 4939 - RNA, 21 nt, Artificial Sequence
  C3-targeting RNA guide sequence portion
uggauccucuccaggaccaga

SEQ ID NO: 4940 - RNA, 21 nt, Artificial Sequence
  C3-targeting RNA guide sequence portion
uggauucagggguuagcaggu

SEQ ID NO: 4941 - RNA, 21 nt, Artificial Sequence
  C3-targeting RNA guide sequence portion
uggauuccacaaacacccaac

SEQ ID NO: 4942 - RNA, 21 nt, Artificial Sequence
  C3-targeting RNA guide sequence portion
uggcaagugcgccggcaguca

SEQ ID NO: 4943 - RNA, 21 nt, Artificial Sequence
  C3-targeting RNA guide sequence portion
uggcaggcugugugccccagc

SEQ ID NO: 4944 - RNA, 21 nt, Artificial Sequence
  C3-targeting RNA guide sequence portion
uggcagugcccagagaagaua

SEQ ID NO: 4945 - RNA, 21 nt, Artificial Sequence
  C3-targeting RNA guide sequence portion
uggcauuggcaagugcgccgg

SEQ ID NO: 4946 - RNA, 21 nt, Artificial Sequence
  C3-targeting RNA guide sequence portion
uggcccccucguugcccaggc

SEQ ID NO: 4947 - RNA, 21 nt, Artificial Sequence
  C3-targeting RNA guide sequence portion
uggccuuugaaagccugggca

SEQ ID NO: 4948 - RNA, 21 nt, Artificial Sequence
  C3-targeting RNA guide sequence portion
uggcguauguggguuugggua

SEQ ID NO: 4949 - RNA, 21 nt, Artificial Sequence
  C3-targeting RNA guide sequence portion
uggcgucucacauccguggaa

SEQ ID NO: 4950 - RNA, 21 nt, Artificial Sequence
  C3-targeting RNA guide sequence portion
uggcuacuucggguucaugua

SEQ ID NO: 4951 - RNA, 21 nt, Artificial Sequence
  C3-targeting RNA guide sequence portion
uggcugagagugggagucaug

SEQ ID NO: 4952 - RNA, 21 nt, Artificial Sequence
  C3-targeting RNA guide sequence portion
uggcugcuguccugcccaugu

SEQ ID NO: 4953 - RNA, 21 nt, Artificial Sequence
  C3-targeting RNA guide sequence portion
ugggaaugauuauauauauuu

SEQ ID NO: 4954 - RNA, 21 nt, Artificial Sequence
  C3-targeting RNA guide sequence portion
ugggagucaugguggcugcug

SEQ ID NO: 4955 - RNA, 21 nt, Artificial Sequence
  C3-targeting RNA guide sequence portion
ugggaguuugcagcuugggga

SEQ ID NO: 4956 - RNA, 21 nt, Artificial Sequence
  C3-targeting RNA guide sequence portion
ugggauguguggcccccucgu

SEQ ID NO: 4957 - RNA, 21 nt, Artificial Sequence
  C3-targeting RNA guide sequence portion
ugggauguuucuagaauugag

SEQ ID NO: 4958 - RNA, 21 nt, Artificial Sequence
  C3-targeting RNA guide sequence portion
ugggcaacgagggggccacac

SEQ ID NO: 4959 - RNA, 21 nt, Artificial Sequence
  C3-targeting RNA guide sequence portion
ugggcacugccaccgucucaa

SEQ ID NO: 4960 - RNA, 21 nt, Artificial Sequence
  C3-targeting RNA guide sequence portion
ugggcaggacagcagccacca

SEQ ID NO: 4961 - RNA, 21 nt, Artificial Sequence
  C3-targeting RNA guide sequence portion
ugggccuggccuuugaaagcc

SEQ ID NO: 4962 - RNA, 21 nt, Artificial Sequence
  C3-targeting RNA guide sequence portion
ugggcugccugagaguuuggg

SEQ ID NO: 4963 - RNA, 21 nt, Artificial Sequence
  C3-targeting RNA guide sequence portion
ugggcuugucauuccacggau

SEQ ID NO: 4964 - RNA, 21 nt, Artificial Sequence
  C3-targeting RNA guide sequence portion
uggggacuugcaauuuucagu

SEQ ID NO: 4965 - RNA, 21 nt, Artificial Sequence
  C3-targeting RNA guide sequence portion
uggggcacacagccugccagg

SEQ ID NO: 4966 - RNA, 21 nt, Artificial Sequence
  C3-targeting RNA guide sequence portion
uggggcacgggagugggcuug

SEQ ID NO: 4967 - RNA, 21 nt, Artificial Sequence
  C3-targeting RNA guide sequence portion
uggggcauguguggguuuagg

SEQ ID NO: 4968 - RNA, 21 nt, Artificial Sequence
  C3-targeting RNA guide sequence portion
uggggcauuuggaauugauug

SEQ ID NO: 4969 - RNA, 21 nt, Artificial Sequence
  C3-targeting RNA guide sequence portion
uggggguccaggucccuguag

SEQ ID NO: 4970 - RNA, 21 nt, Artificial Sequence
  C3-targeting RNA guide sequence portion
uggggugcucuaagauuugag

SEQ ID NO: 4971 - RNA, 21 nt, Artificial Sequence
  C3-targeting RNA guide sequence portion
ugggguggaagcagacauuug

SEQ ID NO: 4972 - RNA, 21 nt, Artificial Sequence
  C3-targeting RNA guide sequence portion
ugggguguuggagguuuaggc

SEQ ID NO: 4973 - RNA, 21 nt, Artificial Sequence
  C3-targeting RNA guide sequence portion
uggguagguagaguugagggu

SEQ ID NO: 4974 - RNA, 21 nt, Artificial Sequence
  C3-targeting RNA guide sequence portion
ugggucuggaaguccagagac

SEQ ID NO: 4975 - RNA, 21 nt, Artificial Sequence
  C3-targeting RNA guide sequence portion
uggguguuuauggguugggug

SEQ ID NO: 4976 - RNA, 21 nt, Artificial Sequence
  C3-targeting RNA guide sequence portion
uggguguuuguggaauccagg

SEQ ID NO: 4977 - RNA, 21 nt, Artificial Sequence
  C3-targeting RNA guide sequence portion
uggguguuuguggauucaggg

SEQ ID NO: 4978 - RNA, 21 nt, Artificial Sequence
  C3-targeting RNA guide sequence portion
uggguuggguguuuguggaau

SEQ ID NO: 4979 - RNA, 21 nt, Artificial Sequence
  C3-targeting RNA guide sequence portion
uggguuuaaagauuggcuacu

SEQ ID NO: 4980 - RNA, 21 nt, Artificial Sequence
  C3-targeting RNA guide sequence portion
uggguuuaggcgauugugggu

SEQ ID NO: 4981 - RNA, 21 nt, Artificial Sequence
  C3-targeting RNA guide sequence portion
uggguuuggggugcucuaaga

SEQ ID NO: 4982 - RNA, 21 nt, Artificial Sequence
  C3-targeting RNA guide sequence portion
uggguuuggguagguagaguu

SEQ ID NO: 4983 - RNA, 21 nt, Artificial Sequence
  C3-targeting RNA guide sequence portion
ugguccuggagaggauccagu

SEQ ID NO: 4984 - RNA, 21 nt, Artificial Sequence
  C3-targeting RNA guide sequence portion
ugguggaauuggaguuuggga

SEQ ID NO: 4985 - RNA, 21 nt, Artificial Sequence
  C3-targeting RNA guide sequence portion
ugguggcugcuguccugccca

SEQ ID NO: 4986 - RNA, 21 nt, Artificial Sequence
  C3-targeting RNA guide sequence portion
uggugggauguguggcccccu

SEQ ID NO: 4987 - RNA, 21 nt, Artificial Sequence
  C3-targeting RNA guide sequence portion
ugguguucauugauggugcgg

SEQ ID NO: 4988 - RNA, 21 nt, Artificial Sequence
  C3-targeting RNA guide sequence portion
ugguuaugacucuacccacaa

SEQ ID NO: 4989 - RNA, 21 nt, Artificial Sequence
  C3-targeting RNA guide sequence portion
ugguucugggguggaagcaga

SEQ ID NO: 4990 - RNA, 21 nt, Artificial Sequence
  C3-targeting RNA guide sequence portion
ugguugagacgguggcagugc

SEQ ID NO: 4991 - RNA, 21 nt, Artificial Sequence
  C3-targeting RNA guide sequence portion
ugguuggaagguucaggguuu

SEQ ID NO: 4992 - RNA, 21 nt, Artificial Sequence
  C3-targeting RNA guide sequence portion
ugguuuaggguguauguggug

SEQ ID NO: 4993 - RNA, 21 nt, Artificial Sequence
  C3-targeting RNA guide sequence portion
uguaaacacucaaacucccgg

SEQ ID NO: 4994 - RNA, 21 nt, Artificial Sequence
  C3-targeting RNA guide sequence portion
uguaaaguccaaaccuccgag

SEQ ID NO: 4995 - RNA, 21 nt, Artificial Sequence
  C3-targeting RNA guide sequence portion
uguagaauucagggugcauuu

SEQ ID NO: 4996 - RNA, 21 nt, Artificial Sequence
  C3-targeting RNA guide sequence portion
uguauaguuggggcauuugga

SEQ ID NO: 4997 - RNA, 21 nt, Artificial Sequence
  C3-targeting RNA guide sequence portion
uguauauaaacuccaauucca

SEQ ID NO: 4998 - RNA, 21 nt, Artificial Sequence
  C3-targeting RNA guide sequence portion
uguaugugguguucauugaug

SEQ ID NO: 4999 - RNA, 21 nt, Artificial Sequence
  C3-targeting RNA guide sequence portion
uguauuuauuaggacuggggu

SEQ ID NO: 5000 - RNA, 21 nt, Artificial Sequence
  C3-targeting RNA guide sequence portion
ugucauuccacggaugugaga

SEQ ID NO: 5001 - RNA, 21 nt, Artificial Sequence
  C3-targeting RNA guide sequence portion
uguccgggaguuugaguguuu

SEQ ID NO: 5002 - RNA, 21 nt, Artificial Sequence
  C3-targeting RNA guide sequence portion
uguccugcccaugugguugag

SEQ ID NO: 5003 - RNA, 21 nt, Artificial Sequence
  C3-targeting RNA guide sequence portion
ugucggaguggggcacgggag

SEQ ID NO: 5004 - RNA, 21 nt, Artificial Sequence
  C3-targeting RNA guide sequence portion
ugucugcuuccaccccagaac

SEQ ID NO: 5005 - RNA, 21 nt, Artificial Sequence
  C3-targeting RNA guide sequence portion
ugugagacgccaguccucacu

SEQ ID NO: 5006 - RNA, 21 nt, Artificial Sequence
  C3-targeting RNA guide sequence portion
ugugccccagccucugguccu

SEQ ID NO: 5007 - RNA, 21 nt, Artificial Sequence
  C3-targeting RNA guide sequence portion
uguggaauccagguaucaugg

SEQ ID NO: 5008 - RNA, 21 nt, Artificial Sequence
  C3-targeting RNA guide sequence portion
uguggaauccagguaucgugg

SEQ ID NO: 5009 - RNA, 21 nt, Artificial Sequence
  C3-targeting RNA guide sequence portion
uguggaauccagguauggugg

SEQ ID NO: 5010 - RNA, 21 nt, Artificial Sequence
  C3-targeting RNA guide sequence portion
uguggauucagggguuagcag

SEQ ID NO: 5011 - RNA, 21 nt, Artificial Sequence
  C3-targeting RNA guide sequence portion
uguggcccccucguugcccag

SEQ ID NO: 5012 - RNA, 21 nt, Artificial Sequence
  C3-targeting RNA guide sequence portion
ugugggucuggaaguccagag

SEQ ID NO: 5013 - RNA, 21 nt, Artificial Sequence
  C3-targeting RNA guide sequence portion
uguggguuuaaagauuggcua

SEQ ID NO: 5014 - RNA, 21 nt, Artificial Sequence
  C3-targeting RNA guide sequence portion
uguggguuuaggcgauugugg

SEQ ID NO: 5015 - RNA, 21 nt, Artificial Sequence
  C3-targeting RNA guide sequence portion
uguggguuuggguagguagag

SEQ ID NO: 5016 - RNA, 21 nt, Artificial Sequence
  C3-targeting RNA guide sequence portion
ugugguguucauugauggugc

SEQ ID NO: 5017 - RNA, 21 nt, Artificial Sequence
  C3-targeting RNA guide sequence portion
ugugguugagacgguggcagu

SEQ ID NO: 5018 - RNA, 21 nt, Artificial Sequence
  C3-targeting RNA guide sequence portion
ugugugccccagccucugguc

SEQ ID NO: 5019 - RNA, 21 nt, Artificial Sequence
  C3-targeting RNA guide sequence portion
uguguggcccccucguugccc

SEQ ID NO: 5020 - RNA, 21 nt, Artificial Sequence
  C3-targeting RNA guide sequence portion
uguguggguuuaggcgauugu

SEQ ID NO: 5021 - RNA, 21 nt, Artificial Sequence
  C3-targeting RNA guide sequence portion
uguuggagguuuaggcugggu

SEQ ID NO: 5022 - RNA, 21 nt, Artificial Sequence
  C3-targeting RNA guide sequence portion
uguugguuuaggguguaugug

SEQ ID NO: 5023 - RNA, 21 nt, Artificial Sequence
  C3-targeting RNA guide sequence portion
uguuuagagagguagagguuu

SEQ ID NO: 5024 - RNA, 21 nt, Artificial Sequence
  C3-targeting RNA guide sequence portion
uguuuauggguuggguguuug

SEQ ID NO: 5025 - RNA, 21 nt, Artificial Sequence
  C3-targeting RNA guide sequence portion
uguuucuagaauugaggucau

SEQ ID NO: 5026 - RNA, 21 nt, Artificial Sequence
  C3-targeting RNA guide sequence portion
uguuuguggaauccagguauc

SEQ ID NO: 5027 - RNA, 21 nt, Artificial Sequence
  C3-targeting RNA guide sequence portion
uguuuguggaauccagguaug

SEQ ID NO: 5028 - RNA, 21 nt, Artificial Sequence
  C3-targeting RNA guide sequence portion
uguuuguggauucagggguua

SEQ ID NO: 5029 - RNA, 21 nt, Artificial Sequence
  C3-targeting RNA guide sequence portion
uguuuguggguagagucauaa

SEQ ID NO: 5030 - RNA, 21 nt, Artificial Sequence
  C3-targeting RNA guide sequence portion
uuaaacccacacugaaaauug

SEQ ID NO: 5031 - RNA, 21 nt, Artificial Sequence
  C3-targeting RNA guide sequence portion
uuaaagauuggcuacuucggg

SEQ ID NO: 5032 - RNA, 21 nt, Artificial Sequence
  C3-targeting RNA guide sequence portion
uuacaagauuugggaguuugc

SEQ ID NO: 5033 - RNA, 21 nt, Artificial Sequence
  C3-targeting RNA guide sequence portion
uuacauauuuggaguguuuag

SEQ ID NO: 5034 - RNA, 21 nt, Artificial Sequence
  C3-targeting RNA guide sequence portion
uuagagagguagagguuuagg

SEQ ID NO: 5035 - RNA, 21 nt, Artificial Sequence
  C3-targeting RNA guide sequence portion
uuagagcaccccaaacccagc

SEQ ID NO: 5036 - RNA, 21 nt, Artificial Sequence
  C3-targeting RNA guide sequence portion
uuagagguuuuggcguaugug

SEQ ID NO: 5037 - RNA, 21 nt, Artificial Sequence
  C3-targeting RNA guide sequence portion
uuaggacugggguguuggagg

SEQ ID NO: 5038 - RNA, 21 nt, Artificial Sequence
  C3-targeting RNA guide sequence portion
uuaggcgauugugggucugga

SEQ ID NO: 5039 - RNA, 21 nt, Artificial Sequence
  C3-targeting RNA guide sequence portion
uuaggcuggguuuggggugcu

SEQ ID NO: 5040 - RNA, 21 nt, Artificial Sequence
  C3-targeting RNA guide sequence portion
uuaggguguaugugguguuca

SEQ ID NO: 5041 - RNA, 21 nt, Artificial Sequence
  C3-targeting RNA guide sequence portion
uuaggguuuggggcaugugug

SEQ ID NO: 5042 - RNA, 21 nt, Artificial Sequence
  C3-targeting RNA guide sequence portion
uuauauacauuugggcugccu

SEQ ID NO: 5043 - RNA, 21 nt, Artificial Sequence
  C3-targeting RNA guide sequence portion
uuauauauauuugggcugccu

SEQ ID NO: 5044 - RNA, 21 nt, Artificial Sequence
  C3-targeting RNA guide sequence portion
uuaucuucucugggcacugcc

SEQ ID NO: 5045 - RNA, 21 nt, Artificial Sequence
  C3-targeting RNA guide sequence portion
uuaugacucuacccacaaaca

SEQ ID NO: 5046 - RNA, 21 nt, Artificial Sequence
  C3-targeting RNA guide sequence portion
uuauggguuggguguuugugg

SEQ ID NO: 5047 - RNA, 21 nt, Artificial Sequence
  C3-targeting RNA guide sequence portion
uuauuaggacugggguguugg

SEQ ID NO: 5048 - RNA, 21 nt, Artificial Sequence
  C3-targeting RNA guide sequence portion
uucaaaggccaggcccagcug

SEQ ID NO: 5049 - RNA, 21 nt, Artificial Sequence
  C3-targeting RNA guide sequence portion
uucagggguuagcagguuggg

SEQ ID NO: 5050 - RNA, 21 nt, Artificial Sequence
  C3-targeting RNA guide sequence portion
uucagggugcauuuggguguu

SEQ ID NO: 5051 - RNA, 21 nt, Artificial Sequence
  C3-targeting RNA guide sequence portion
uucaggguuuggugggaugug

SEQ ID NO: 5052 - RNA, 21 nt, Artificial Sequence
  C3-targeting RNA guide sequence portion
uucaguguggguuuaaagauu

SEQ ID NO: 5053 - RNA, 21 nt, Artificial Sequence
  C3-targeting RNA guide sequence portion
uucauguauaguuggggcauu

SEQ ID NO: 5054 - RNA, 21 nt, Artificial Sequence
  C3-targeting RNA guide sequence portion
uuccaaaugccccaacuauac

SEQ ID NO: 5055 - RNA, 21 nt, Artificial Sequence
  C3-targeting RNA guide sequence portion
uuccaaccagcgucagcaacu

SEQ ID NO: 5056 - RNA, 21 nt, Artificial Sequence
  C3-targeting RNA guide sequence portion
uuccacaaacacccaacccau

SEQ ID NO: 5057 - RNA, 21 nt, Artificial Sequence
  C3-targeting RNA guide sequence portion
uuccaccauaccuggauucca

SEQ ID NO: 5058 - RNA, 21 nt, Artificial Sequence
  C3-targeting RNA guide sequence portion
uuccaccccagaaccagcccu

SEQ ID NO: 5059 - RNA, 21 nt, Artificial Sequence
  C3-targeting RNA guide sequence portion
uuccacgauaccuggauucca

SEQ ID NO: 5060 - RNA, 21 nt, Artificial Sequence
  C3-targeting RNA guide sequence portion
uuccacggaugugagacgcca

SEQ ID NO: 5061 - RNA, 21 nt, Artificial Sequence
  C3-targeting RNA guide sequence portion
uuccagacccacaaucgccua

SEQ ID NO: 5062 - RNA, 21 nt, Artificial Sequence
  C3-targeting RNA guide sequence portion
uuccaugauaccuggauucca

SEQ ID NO: 5063 - RNA, 21 nt, Artificial Sequence
  C3-targeting RNA guide sequence portion
uucccaaccugcuaaccccug

SEQ ID NO: 5064 - RNA, 21 nt, Artificial Sequence
  C3-targeting RNA guide sequence portion
uucggguucauguauaguugg

SEQ ID NO: 5065 - RNA, 21 nt, Artificial Sequence
  C3-targeting RNA guide sequence portion
uucuacagggaccuggacccc

SEQ ID NO: 5066 - RNA, 21 nt, Artificial Sequence
  C3-targeting RNA guide sequence portion
uucuagaaacaucccaaacuc

SEQ ID NO: 5067 - RNA, 21 nt, Artificial Sequence
  C3-targeting RNA guide sequence portion
uucuagaauugaggucaucug

SEQ ID NO: 5068 - RNA, 21 nt, Artificial Sequence
  C3-targeting RNA guide sequence portion
uucucugggcacugccaccgu

SEQ ID NO: 5069 - RNA, 21 nt, Artificial Sequence
  C3-targeting RNA guide sequence portion
uucugggguggaagcagacau

SEQ ID NO: 5070 - RNA, 21 nt, Artificial Sequence
  C3-targeting RNA guide sequence portion
uugaaagccugggcaacgagg

SEQ ID NO: 5071 - RNA, 21 nt, Artificial Sequence
  C3-targeting RNA guide sequence portion
uugagacgguggcagugccca

SEQ ID NO: 5072 - RNA, 21 nt, Artificial Sequence
  C3-targeting RNA guide sequence portion
uugaggguguccgggaguuug

SEQ ID NO: 5073 - RNA, 21 nt, Artificial Sequence
  C3-targeting RNA guide sequence portion
uugaggucaucuguugguuua

SEQ ID NO: 5074 - RNA, 21 nt, Artificial Sequence
  C3-targeting RNA guide sequence portion
uugagguuuagagguuuuggc

SEQ ID NO: 5075 - RNA, 21 nt, Artificial Sequence
  C3-targeting RNA guide sequence portion
uugauuguauuuauuaggacu

SEQ ID NO: 5076 - RNA, 21 nt, Artificial Sequence
  C3-targeting RNA guide sequence portion
uugcaaguccccaagcugcaa

SEQ ID NO: 5077 - RNA, 21 nt, Artificial Sequence
  C3-targeting RNA guide sequence portion
uugcaauuuucaguguggguu

SEQ ID NO: 5078 - RNA, 21 nt, Artificial Sequence
  C3-targeting RNA guide sequence portion
uugcagcuuggggacuugcaa

SEQ ID NO: 5079 - RNA, 21 nt, Artificial Sequence
  C3-targeting RNA guide sequence portion
uugccaaugccauuaucuucu

SEQ ID NO: 5080 - RNA, 21 nt, Artificial Sequence
  C3-targeting RNA guide sequence portion
uugcccaggcuuucaaaggcc

SEQ ID NO: 5081 - RNA, 21 nt, Artificial Sequence
  C3-targeting RNA guide sequence portion
uugcugacgcugguuggaagg

SEQ ID NO: 5082 - RNA, 21 nt, Artificial Sequence
  C3-targeting RNA guide sequence portion
uuggaagguucaggguuuggu

SEQ ID NO: 5083 - RNA, 21 nt, Artificial Sequence
  C3-targeting RNA guide sequence portion
uuggacuuuacaagauuuggg

SEQ ID NO: 5084 - RNA, 21 nt, Artificial Sequence
  C3-targeting RNA guide sequence portion
uuggagacucggagguuugga

SEQ ID NO: 5085 - RNA, 21 nt, Artificial Sequence
  C3-targeting RNA guide sequence portion
uuggaggaguugcugacgcug

SEQ ID NO: 5086 - RNA, 21 nt, Artificial Sequence
  C3-targeting RNA guide sequence portion
uuggagguuuaggcuggguuu

SEQ ID NO: 5087 - RNA, 21 nt, Artificial Sequence
  C3-targeting RNA guide sequence portion
uuggaguguuuagagagguag

SEQ ID NO: 5088 - RNA, 21 nt, Artificial Sequence
  C3-targeting RNA guide sequence portion
uuggaguuugggauguuucua

SEQ ID NO: 5089 - RNA, 21 nt, Artificial Sequence
  C3-targeting RNA guide sequence portion
uuggcaagugcgccggcaguc

SEQ ID NO: 5090 - RNA, 21 nt, Artificial Sequence
  C3-targeting RNA guide sequence portion
uuggcguauguggguuugggu

SEQ ID NO: 5091 - RNA, 21 nt, Artificial Sequence
  C3-targeting RNA guide sequence portion
uuggcuacuucggguucaugu

SEQ ID NO: 5092 - RNA, 21 nt, Artificial Sequence
  C3-targeting RNA guide sequence portion
uugggaguuugcagcuugggg

SEQ ID NO: 5093 - RNA, 21 nt, Artificial Sequence
  C3-targeting RNA guide sequence portion
uugggauguuucuagaauuga

SEQ ID NO: 5094 - RNA, 21 nt, Artificial Sequence
  C3-targeting RNA guide sequence portion
uugggcugccugagaguuugg

SEQ ID NO: 5095 - RNA, 21 nt, Artificial Sequence
  C3-targeting RNA guide sequence portion
uuggggacuugcaauuuucag

SEQ ID NO: 5096 - RNA, 21 nt, Artificial Sequence
  C3-targeting RNA guide sequence portion
uuggggcauguguggguuuag

SEQ ID NO: 5097 - RNA, 21 nt, Artificial Sequence
  C3-targeting RNA guide sequence portion
uuggggcauuuggaauugauu

SEQ ID NO: 5098 - RNA, 21 nt, Artificial Sequence
  C3-targeting RNA guide sequence portion
uuggggguccaggucccugua

SEQ ID NO: 5099 - RNA, 21 nt, Artificial Sequence
  C3-targeting RNA guide sequence portion
uuggggugcucuaagauuuga

SEQ ID NO: 5100 - RNA, 21 nt, Artificial Sequence
  C3-targeting RNA guide sequence portion
uuggguagguagaguugaggg

SEQ ID NO: 5101 - RNA, 21 nt, Artificial Sequence
  C3-targeting RNA guide sequence portion
uuggguguuuauggguugggu

SEQ ID NO: 5102 - RNA, 21 nt, Artificial Sequence
  C3-targeting RNA guide sequence portion
uuggguguuuguggaauccag

SEQ ID NO: 5103 - RNA, 21 nt, Artificial Sequence
  C3-targeting RNA guide sequence portion
uuggguguuuguggauucagg

SEQ ID NO: 5104 - RNA, 21 nt, Artificial Sequence
  C3-targeting RNA guide sequence portion
uuggugggauguguggccccc

SEQ ID NO: 5105 - RNA, 21 nt, Artificial Sequence
  C3-targeting RNA guide sequence portion
uugguuuaggguguauguggu

SEQ ID NO: 5106 - RNA, 21 nt, Artificial Sequence
  C3-targeting RNA guide sequence portion
uuguaaaguccaaaccuccga

SEQ ID NO: 5107 - RNA, 21 nt, Artificial Sequence
  C3-targeting RNA guide sequence portion
uuguauuuauuaggacugggg

SEQ ID NO: 5108 - RNA, 21 nt, Artificial Sequence
  C3-targeting RNA guide sequence portion
uugucauuccacggaugugag

SEQ ID NO: 5109 - RNA, 21 nt, Artificial Sequence
  C3-targeting RNA guide sequence portion
uuguggaauccagguaucaug

SEQ ID NO: 5110 - RNA, 21 nt, Artificial Sequence
  C3-targeting RNA guide sequence portion
uuguggaauccagguaucgug

SEQ ID NO: 5111 - RNA, 21 nt, Artificial Sequence
  C3-targeting RNA guide sequence portion
uuguggaauccagguauggug

SEQ ID NO: 5112 - RNA, 21 nt, Artificial Sequence
  C3-targeting RNA guide sequence portion
uuguggauucagggguuagca

SEQ ID NO: 5113 - RNA, 21 nt, Artificial Sequence
  C3-targeting RNA guide sequence portion
uugugggucuggaaguccaga

SEQ ID NO: 5114 - RNA, 21 nt, Artificial Sequence
  C3-targeting RNA guide sequence portion
uuuaaacccacacugaaaauu

SEQ ID NO: 5115 - RNA, 21 nt, Artificial Sequence
  C3-targeting RNA guide sequence portion
uuuaaagauuggcuacuucgg

SEQ ID NO: 5116 - RNA, 21 nt, Artificial Sequence
  C3-targeting RNA guide sequence portion
uuuacaagauuugggaguuug

SEQ ID NO: 5117 - RNA, 21 nt, Artificial Sequence
  C3-targeting RNA guide sequence portion
uuuacauauuuggaguguuua

SEQ ID NO: 5118 - RNA, 21 nt, Artificial Sequence
  C3-targeting RNA guide sequence portion
uuuagagagguagagguuuag

SEQ ID NO: 5119 - RNA, 21 nt, Artificial Sequence
  C3-targeting RNA guide sequence portion
uuuagagguuuuggcguaugu

SEQ ID NO: 5120 - RNA, 21 nt, Artificial Sequence
  C3-targeting RNA guide sequence portion
uuuaggcgauugugggucugg

SEQ ID NO: 5121 - RNA, 21 nt, Artificial Sequence
  C3-targeting RNA guide sequence portion
uuuaggcuggguuuggggugc

SEQ ID NO: 5122 - RNA, 21 nt, Artificial Sequence
  C3-targeting RNA guide sequence portion
uuuaggguguaugugguguuc

SEQ ID NO: 5123 - RNA, 21 nt, Artificial Sequence
  C3-targeting RNA guide sequence portion
uuuaggguuuggggcaugugu

SEQ ID NO: 5124 - RNA, 21 nt, Artificial Sequence
  C3-targeting RNA guide sequence portion
uuuauauacauuugggcugcc

SEQ ID NO: 5125 - RNA, 21 nt, Artificial Sequence
  C3-targeting RNA guide sequence portion
uuuauggguuggguguuugug

SEQ ID NO: 5126 - RNA, 21 nt, Artificial Sequence
  C3-targeting RNA guide sequence portion
uuuauuaggacugggguguug

SEQ ID NO: 5127 - RNA, 21 nt, Artificial Sequence
  C3-targeting RNA guide sequence portion
uuucaaaggccaggcccagcu

SEQ ID NO: 5128 - RNA, 21 nt, Artificial Sequence
  C3-targeting RNA guide sequence portion
uuucaguguggguuuaaagau

SEQ ID NO: 5129 - RNA, 21 nt, Artificial Sequence
  C3-targeting RNA guide sequence portion
uuucuagaauugaggucaucu

SEQ ID NO: 5130 - RNA, 21 nt, Artificial Sequence
  C3-targeting RNA guide sequence portion
uuugaaagccugggcaacgag

SEQ ID NO: 5131 - RNA, 21 nt, Artificial Sequence
  C3-targeting RNA guide sequence portion
uuugagguuuagagguuuugg

SEQ ID NO: 5132 - RNA, 21 nt, Artificial Sequence
  C3-targeting RNA guide sequence portion
uuugcagcuuggggacuugca

SEQ ID NO: 5133 - RNA, 21 nt, Artificial Sequence
  C3-targeting RNA guide sequence portion
uuuggacuuuacaagauuugg

SEQ ID NO: 5134 - RNA, 21 nt, Artificial Sequence
  C3-targeting RNA guide sequence portion
uuuggagacucggagguuugg

SEQ ID NO: 5135 - RNA, 21 nt, Artificial Sequence
  C3-targeting RNA guide sequence portion
uuuggaguguuuagagaggua

SEQ ID NO: 5136 - RNA, 21 nt, Artificial Sequence
  C3-targeting RNA guide sequence portion
uuuggcguauguggguuuggg

SEQ ID NO: 5137 - RNA, 21 nt, Artificial Sequence
  C3-targeting RNA guide sequence portion
uuugggaguuugcagcuuggg

SEQ ID NO: 5138 - RNA, 21 nt, Artificial Sequence
  C3-targeting RNA guide sequence portion
uuugggauguuucuagaauug

SEQ ID NO: 5139 - RNA, 21 nt, Artificial Sequence
  C3-targeting RNA guide sequence portion
uuugggcugccugagaguuug

SEQ ID NO: 5140 - RNA, 21 nt, Artificial Sequence
  C3-targeting RNA guide sequence portion
uuuggggcauguguggguuua

SEQ ID NO: 5141 - RNA, 21 nt, Artificial Sequence
  C3-targeting RNA guide sequence portion
uuuggggguccaggucccugu

SEQ ID NO: 5142 - RNA, 21 nt, Artificial Sequence
  C3-targeting RNA guide sequence portion
uuuggggugcucuaagauuug

SEQ ID NO: 5143 - RNA, 21 nt, Artificial Sequence
  C3-targeting RNA guide sequence portion
uuuggguagguagaguugagg

SEQ ID NO: 5144 - RNA, 21 nt, Artificial Sequence
  C3-targeting RNA guide sequence portion
uuuggguguuuauggguuggg

SEQ ID NO: 5145 - RNA, 21 nt, Artificial Sequence
  C3-targeting RNA guide sequence portion
uuuggguguuuguggauucag

SEQ ID NO: 5146 - RNA, 21 nt, Artificial Sequence
  C3-targeting RNA guide sequence portion
uuuggugggauguguggcccc

SEQ ID NO: 5147 - RNA, 21 nt, Artificial Sequence
  C3-targeting RNA guide sequence portion
uuuguggaauccagguaucau

SEQ ID NO: 5148 - RNA, 21 nt, Artificial Sequence
  C3-targeting RNA guide sequence portion
uuuguggaauccagguaucgu

SEQ ID NO: 5149 - RNA, 21 nt, Artificial Sequence
  C3-targeting RNA guide sequence portion
uuuguggaauccagguauggu

SEQ ID NO: 5150 - RNA, 21 nt, Artificial Sequence
  C3-targeting RNA guide sequence portion
uuuguggauucagggguuagc

SEQ ID NO: 5151 - RNA, 21 nt, Artificial Sequence
  C3-targeting RNA guide sequence portion
uuuguggguagagucauaacc

SEQ ID NO: 5152 - RNA, 21 nt, Artificial Sequence
  C3-targeting RNA guide sequence portion
uuuucaguguggguuuaaaga

SEQ ID NO: 5153 - RNA, 21 nt, Artificial Sequence
  C3-targeting RNA guide sequence portion
uuuuggcguauguggguuugg

SEQ ID NO: 5154 - RNA, 22 nt, Artificial Sequence
  C3-targeting RNA guide sequence portion
aaaaccucuaaaccucaaaucu

SEQ ID NO: 5155 - RNA, 22 nt, Artificial Sequence
  C3-targeting RNA guide sequence portion
aaaauugcaaguccccaagcug

SEQ ID NO: 5156 - RNA, 22 nt, Artificial Sequence
  C3-targeting RNA guide sequence portion
aaacacccaaacucucaggcag

SEQ ID NO: 5157 - RNA, 22 nt, Artificial Sequence
  C3-targeting RNA guide sequence portion
aaacacccaaaugcacccugaa

SEQ ID NO: 5158 - RNA, 22 nt, Artificial Sequence
  C3-targeting RNA guide sequence portion
aaacacccaacccauaaacacc

SEQ ID NO: 5159 - RNA, 22 nt, Artificial Sequence
  C3-targeting RNA guide sequence portion
aaacacucaaacucccggacac

SEQ ID NO: 5160 - RNA, 22 nt, Artificial Sequence
  C3-targeting RNA guide sequence portion
aaacagggcugguucuggggug

SEQ ID NO: 5161 - RNA, 22 nt, Artificial Sequence
  C3-targeting RNA guide sequence portion
aaacaucccaaacuccaauucc

SEQ ID NO: 5162 - RNA, 22 nt, Artificial Sequence
  C3-targeting RNA guide sequence portion
aaaccaacagaugaccucaauu

SEQ ID NO: 5163 - RNA, 22 nt, Artificial Sequence
  C3-targeting RNA guide sequence portion
aaacccacacaugccccaaacc

SEQ ID NO: 5164 - RNA, 22 nt, Artificial Sequence
  C3-targeting RNA guide sequence portion
aaacccacacugaaaauugcaa

SEQ ID NO: 5165 - RNA, 22 nt, Artificial Sequence
  C3-targeting RNA guide sequence portion
aaacccacauacgccaaaaccu

SEQ ID NO: 5166 - RNA, 22 nt, Artificial Sequence
  C3-targeting RNA guide sequence portion
aaacccagccuaaaccuccaac

SEQ ID NO: 5167 - RNA, 22 nt, Artificial Sequence
  C3-targeting RNA guide sequence portion
aaacccuaaaccucuaccucuc

SEQ ID NO: 5168 - RNA, 22 nt, Artificial Sequence
  C3-targeting RNA guide sequence portion
aaacccugaaccuuccaaccag

SEQ ID NO: 5169 - RNA, 22 nt, Artificial Sequence
  C3-targeting RNA guide sequence portion
aaaccucaaaucuuagagcacc

SEQ ID NO: 5170 - RNA, 22 nt, Artificial Sequence
  C3-targeting RNA guide sequence portion
aaaccuccaacaccccaguccu

SEQ ID NO: 5171 - RNA, 22 nt, Artificial Sequence
  C3-targeting RNA guide sequence portion
aaaccucuaaaccucaaaucuu

SEQ ID NO: 5172 - RNA, 22 nt, Artificial Sequence
  C3-targeting RNA guide sequence portion
aaaccucuaccucucuaaacac

SEQ ID NO: 5173 - RNA, 22 nt, Artificial Sequence
  C3-targeting RNA guide sequence portion
aaacucacaggcagcccaaaua

SEQ ID NO: 5174 - RNA, 22 nt, Artificial Sequence
  C3-targeting RNA guide sequence portion
aaacucacaggcagcccaaaug

SEQ ID NO: 5175 - RNA, 22 nt, Artificial Sequence
  C3-targeting RNA guide sequence portion
aaacuccaauuccaccauaccu

SEQ ID NO: 5176 - RNA, 22 nt, Artificial Sequence
  C3-targeting RNA guide sequence portion
aaacuccaauuccacgauaccu

SEQ ID NO: 5177 - RNA, 22 nt, Artificial Sequence
  C3-targeting RNA guide sequence portion
aaacuccaauuccaugauaccu

SEQ ID NO: 5178 - RNA, 22 nt, Artificial Sequence
  C3-targeting RNA guide sequence portion
aaacucccaaaucuuguaaagu

SEQ ID NO: 5179 - RNA, 22 nt, Artificial Sequence
  C3-targeting RNA guide sequence portion
aaacucccggacacccucaacu

SEQ ID NO: 5180 - RNA, 22 nt, Artificial Sequence
  C3-targeting RNA guide sequence portion
aaacucucaggcagcccaaaug

SEQ ID NO: 5181 - RNA, 22 nt, Artificial Sequence
  C3-targeting RNA guide sequence portion
aaagauuggcuacuucggguuc

SEQ ID NO: 5182 - RNA, 22 nt, Artificial Sequence
  C3-targeting RNA guide sequence portion
aaagccugggcaacgagggggc

SEQ ID NO: 5183 - RNA, 22 nt, Artificial Sequence
  C3-targeting RNA guide sequence portion
aaaggccaggcccagcuggcug

SEQ ID NO: 5184 - RNA, 22 nt, Artificial Sequence
  C3-targeting RNA guide sequence portion
aaauacaaucaauuccaaaugc

SEQ ID NO: 5185 - RNA, 22 nt, Artificial Sequence
  C3-targeting RNA guide sequence portion
aaauauguaaacacucaaacuc

SEQ ID NO: 5186 - RNA, 22 nt, Artificial Sequence
  C3-targeting RNA guide sequence portion
aaaucuuagagcaccccaaacc

SEQ ID NO: 5187 - RNA, 22 nt, Artificial Sequence
  C3-targeting RNA guide sequence portion
aaaucuuguaaaguccaaaccu

SEQ ID NO: 5188 - RNA, 22 nt, Artificial Sequence
  C3-targeting RNA guide sequence portion
aaaugcacccugaauucuacag

SEQ ID NO: 5189 - RNA, 22 nt, Artificial Sequence
  C3-targeting RNA guide sequence portion
aaaugccccaacuauacaugaa

SEQ ID NO: 5190 - RNA, 22 nt, Artificial Sequence
  C3-targeting RNA guide sequence portion
aaaugucugcuuccaccccaga

SEQ ID NO: 5191 - RNA, 22 nt, Artificial Sequence
  C3-targeting RNA guide sequence portion
aaauugcaaguccccaagcugc

SEQ ID NO: 5192 - RNA, 22 nt, Artificial Sequence
  C3-targeting RNA guide sequence portion
aacaccacauacacccuaaacc

SEQ ID NO: 5193 - RNA, 22 nt, Artificial Sequence
  C3-targeting RNA guide sequence portion
aacacccaaacucucaggcagc

SEQ ID NO: 5194 - RNA, 22 nt, Artificial Sequence
  C3-targeting RNA guide sequence portion
aacacccaaaugcacccugaau

SEQ ID NO: 5195 - RNA, 22 nt, Artificial Sequence
  C3-targeting RNA guide sequence portion
aacacccaacccauaaacaccc

SEQ ID NO: 5196 - RNA, 22 nt, Artificial Sequence
  C3-targeting RNA guide sequence portion
aacaccccaguccuaauaaaua

SEQ ID NO: 5197 - RNA, 22 nt, Artificial Sequence
  C3-targeting RNA guide sequence portion
aacacucaaacucccggacacc

SEQ ID NO: 5198 - RNA, 22 nt, Artificial Sequence
  C3-targeting RNA guide sequence portion
aacacuccaaauauguaaacac

SEQ ID NO: 5199 - RNA, 22 nt, Artificial Sequence
  C3-targeting RNA guide sequence portion
aacagaugaccucaauucuaga

SEQ ID NO: 5200 - RNA, 22 nt, Artificial Sequence
  C3-targeting RNA guide sequence portion
aacagggcugguucuggggugg

SEQ ID NO: 5201 - RNA, 22 nt, Artificial Sequence
  C3-targeting RNA guide sequence portion
aacaucccaaacuccaauucca

SEQ ID NO: 5202 - RNA, 22 nt, Artificial Sequence
  C3-targeting RNA guide sequence portion
aaccaacagaugaccucaauuc

SEQ ID NO: 5203 - RNA, 22 nt, Artificial Sequence
  C3-targeting RNA guide sequence portion
aaccacaugggcaggacagcag

SEQ ID NO: 5204 - RNA, 22 nt, Artificial Sequence
  C3-targeting RNA guide sequence portion
aaccagcccuguuuguggguag

SEQ ID NO: 5205 - RNA, 22 nt, Artificial Sequence
  C3-targeting RNA guide sequence portion
aaccagcgucagcaacuccucc

SEQ ID NO: 5206 - RNA, 22 nt, Artificial Sequence
  C3-targeting RNA guide sequence portion
aacccacacaugccccaaaccc

SEQ ID NO: 5207 - RNA, 22 nt, Artificial Sequence
  C3-targeting RNA guide sequence portion
aacccacacugaaaauugcaag

SEQ ID NO: 5208 - RNA, 22 nt, Artificial Sequence
  C3-targeting RNA guide sequence portion
aacccacauacgccaaaaccuc

SEQ ID NO: 5209 - RNA, 22 nt, Artificial Sequence
  C3-targeting RNA guide sequence portion
aacccagccuaaaccuccaaca

SEQ ID NO: 5210 - RNA, 22 nt, Artificial Sequence
  C3-targeting RNA guide sequence portion
aacccauaaacacccaaacucu

SEQ ID NO: 5211 - RNA, 22 nt, Artificial Sequence
  C3-targeting RNA guide sequence portion
aaccccugaauccacaaacacc

SEQ ID NO: 5212 - RNA, 22 nt, Artificial Sequence
  C3-targeting RNA guide sequence portion
aacccgaaguagccaaucuuua

SEQ ID NO: 5213 - RNA, 22 nt, Artificial Sequence
  C3-targeting RNA guide sequence portion
aacccuaaaccucuaccucucu

SEQ ID NO: 5214 - RNA, 22 nt, Artificial Sequence
  C3-targeting RNA guide sequence portion
aacccugaaccuuccaaccagc

SEQ ID NO: 5215 - RNA, 22 nt, Artificial Sequence
  C3-targeting RNA guide sequence portion
aaccgcaccaucaaugaacacc

SEQ ID NO: 5216 - RNA, 22 nt, Artificial Sequence
  C3-targeting RNA guide sequence portion
aaccucaaaucuuagagcaccc

SEQ ID NO: 5217 - RNA, 22 nt, Artificial Sequence
  C3-targeting RNA guide sequence portion
aaccuccaacaccccaguccua

SEQ ID NO: 5218 - RNA, 22 nt, Artificial Sequence
  C3-targeting RNA guide sequence portion
aaccucuaaaccucaaaucuua

SEQ ID NO: 5219 - RNA, 22 nt, Artificial Sequence
  C3-targeting RNA guide sequence portion
aaccucuaccucucuaaacacu

SEQ ID NO: 5220 - RNA, 22 nt, Artificial Sequence
  C3-targeting RNA guide sequence portion
aaccugcuaaccccugaaucca

SEQ ID NO: 5221 - RNA, 22 nt, Artificial Sequence
  C3-targeting RNA guide sequence portion
aaccuuccaaccagcgucagca

SEQ ID NO: 5222 - RNA, 22 nt, Artificial Sequence
  C3-targeting RNA guide sequence portion
aacgagggggccacacauccca

SEQ ID NO: 5223 - RNA, 22 nt, Artificial Sequence
  C3-targeting RNA guide sequence portion
aacuauacaugaacccgaagua

SEQ ID NO: 5224 - RNA, 22 nt, Artificial Sequence
  C3-targeting RNA guide sequence portion
aacucacaggcagcccaaauau

SEQ ID NO: 5225 - RNA, 22 nt, Artificial Sequence
  C3-targeting RNA guide sequence portion
aacucacaggcagcccaaaugu

SEQ ID NO: 5226 - RNA, 22 nt, Artificial Sequence
  C3-targeting RNA guide sequence portion
aacuccaauuccaccauaccug

SEQ ID NO: 5227 - RNA, 22 nt, Artificial Sequence
  C3-targeting RNA guide sequence portion
aacuccaauuccacgauaccug

SEQ ID NO: 5228 - RNA, 22 nt, Artificial Sequence
  C3-targeting RNA guide sequence portion
aacuccaauuccaugauaccug

SEQ ID NO: 5229 - RNA, 22 nt, Artificial Sequence
  C3-targeting RNA guide sequence portion
aacucccaaaucuuguaaaguc

SEQ ID NO: 5230 - RNA, 22 nt, Artificial Sequence
  C3-targeting RNA guide sequence portion
aacucccggacacccucaacuc

SEQ ID NO: 5231 - RNA, 22 nt, Artificial Sequence
  C3-targeting RNA guide sequence portion
aacuccuccaagucucuggacu

SEQ ID NO: 5232 - RNA, 22 nt, Artificial Sequence
  C3-targeting RNA guide sequence portion
aacucuaccuacccaaacccac

SEQ ID NO: 5233 - RNA, 22 nt, Artificial Sequence
  C3-targeting RNA guide sequence portion
aacucucaggcagcccaaaugu

SEQ ID NO: 5234 - RNA, 22 nt, Artificial Sequence
  C3-targeting RNA guide sequence portion
aagauaauggcauuggcaagug

SEQ ID NO: 5235 - RNA, 22 nt, Artificial Sequence
  C3-targeting RNA guide sequence portion
aagauuggcuacuucggguuca

SEQ ID NO: 5236 - RNA, 22 nt, Artificial Sequence
  C3-targeting RNA guide sequence portion
aagauuugagguuuagagguuu

SEQ ID NO: 5237 - RNA, 22 nt, Artificial Sequence
  C3-targeting RNA guide sequence portion
aagauuugggaguuugcagcuu

SEQ ID NO: 5238 - RNA, 22 nt, Artificial Sequence
  C3-targeting RNA guide sequence portion
aagcagacauuuggggguccag

SEQ ID NO: 5239 - RNA, 22 nt, Artificial Sequence
  C3-targeting RNA guide sequence portion
aagcccacucccgugccccacu

SEQ ID NO: 5240 - RNA, 22 nt, Artificial Sequence
  C3-targeting RNA guide sequence portion
aagccugggcaacgagggggcc

SEQ ID NO: 5241 - RNA, 22 nt, Artificial Sequence
  C3-targeting RNA guide sequence portion
aagcugcaaacucccaaaucuu

SEQ ID NO: 5242 - RNA, 22 nt, Artificial Sequence
  C3-targeting RNA guide sequence portion
aaggccaggcccagcuggcuga

SEQ ID NO: 5243 - RNA, 22 nt, Artificial Sequence
  C3-targeting RNA guide sequence portion
aagguucaggguuuggugggau

SEQ ID NO: 5244 - RNA, 22 nt, Artificial Sequence
  C3-targeting RNA guide sequence portion
aaguagccaaucuuuaaaccca

SEQ ID NO: 5245 - RNA, 22 nt, Artificial Sequence
  C3-targeting RNA guide sequence portion
aaguccagagacuuggaggagu

SEQ ID NO: 5246 - RNA, 22 nt, Artificial Sequence
  C3-targeting RNA guide sequence portion
aaguccccaagcugcaaacucc

SEQ ID NO: 5247 - RNA, 22 nt, Artificial Sequence
  C3-targeting RNA guide sequence portion
aagucucuggacuuccagaccc

SEQ ID NO: 5248 - RNA, 22 nt, Artificial Sequence
  C3-targeting RNA guide sequence portion
aagugcgccggcagucacugga

SEQ ID NO: 5249 - RNA, 22 nt, Artificial Sequence
  C3-targeting RNA guide sequence portion
aauaaauacaaucaauuccaaa

SEQ ID NO: 5250 - RNA, 22 nt, Artificial Sequence
  C3-targeting RNA guide sequence portion
aauacaaucaauuccaaaugcc

SEQ ID NO: 5251 - RNA, 22 nt, Artificial Sequence
  C3-targeting RNA guide sequence portion
aauauguaaacacucaaacucc

SEQ ID NO: 5252 - RNA, 22 nt, Artificial Sequence
  C3-targeting RNA guide sequence portion
aaucaauuccaaaugccccaac

SEQ ID NO: 5253 - RNA, 22 nt, Artificial Sequence
  C3-targeting RNA guide sequence portion
aaucauucccaaccugcuaacc

SEQ ID NO: 5254 - RNA, 22 nt, Artificial Sequence
  C3-targeting RNA guide sequence portion
aauccacaaacacccaaaugca

SEQ ID NO: 5255 - RNA, 22 nt, Artificial Sequence
  C3-targeting RNA guide sequence portion
aauccagguaucauggaauugg

SEQ ID NO: 5256 - RNA, 22 nt, Artificial Sequence
  C3-targeting RNA guide sequence portion
aauccagguaucguggaauugg

SEQ ID NO: 5257 - RNA, 22 nt, Artificial Sequence
  C3-targeting RNA guide sequence portion
aauccagguaugguggaauugg

SEQ ID NO: 5258 - RNA, 22 nt, Artificial Sequence
  C3-targeting RNA guide sequence portion
aaucgccuaaacccacacaugc

SEQ ID NO: 5259 - RNA, 22 nt, Artificial Sequence
  C3-targeting RNA guide sequence portion
aaucuuagagcaccccaaaccc

SEQ ID NO: 5260 - RNA, 22 nt, Artificial Sequence
  C3-targeting RNA guide sequence portion
aaucuuguaaaguccaaaccuc

SEQ ID NO: 5261 - RNA, 22 nt, Artificial Sequence
  C3-targeting RNA guide sequence portion
aaucuuuaaacccacacugaaa

SEQ ID NO: 5262 - RNA, 22 nt, Artificial Sequence
  C3-targeting RNA guide sequence portion
aaugaacaccacauacacccua

SEQ ID NO: 5263 - RNA, 22 nt, Artificial Sequence
  C3-targeting RNA guide sequence portion
aaugacaagcccacucccgugc

SEQ ID NO: 5264 - RNA, 22 nt, Artificial Sequence
  C3-targeting RNA guide sequence portion
aaugauuauauauauuugggcu

SEQ ID NO: 5265 - RNA, 22 nt, Artificial Sequence
  C3-targeting RNA guide sequence portion
aaugcacccugaauucuacagg

SEQ ID NO: 5266 - RNA, 22 nt, Artificial Sequence
  C3-targeting RNA guide sequence portion
aaugccauuaucuucucugggc

SEQ ID NO: 5267 - RNA, 22 nt, Artificial Sequence
  C3-targeting RNA guide sequence portion
aaugccccaacuauacaugaac

SEQ ID NO: 5268 - RNA, 22 nt, Artificial Sequence
  C3-targeting RNA guide sequence portion
aauggcauuggcaagugcgccg

SEQ ID NO: 5269 - RNA, 22 nt, Artificial Sequence
  C3-targeting RNA guide sequence portion
aaugucugcuuccaccccagaa

SEQ ID NO: 5270 - RNA, 22 nt, Artificial Sequence
  C3-targeting RNA guide sequence portion
aauucagggugcauuugggugu

SEQ ID NO: 5271 - RNA, 22 nt, Artificial Sequence
  C3-targeting RNA guide sequence portion
aauuccaaaugccccaacuaua

SEQ ID NO: 5272 - RNA, 22 nt, Artificial Sequence
  C3-targeting RNA guide sequence portion
aauuccaccauaccuggauucc

SEQ ID NO: 5273 - RNA, 22 nt, Artificial Sequence
  C3-targeting RNA guide sequence portion
aauuccacgauaccuggauucc

SEQ ID NO: 5274 - RNA, 22 nt, Artificial Sequence
  C3-targeting RNA guide sequence portion
aauuccaugauaccuggauucc

SEQ ID NO: 5275 - RNA, 22 nt, Artificial Sequence
  C3-targeting RNA guide sequence portion
aauucuacagggaccuggaccc

SEQ ID NO: 5276 - RNA, 22 nt, Artificial Sequence
  C3-targeting RNA guide sequence portion
aauucuagaaacaucccaaacu

SEQ ID NO: 5277 - RNA, 22 nt, Artificial Sequence
  C3-targeting RNA guide sequence portion
aauugaggucaucuguugguuu

SEQ ID NO: 5278 - RNA, 22 nt, Artificial Sequence
  C3-targeting RNA guide sequence portion
aauugauuguauuuauuaggac

SEQ ID NO: 5279 - RNA, 22 nt, Artificial Sequence
  C3-targeting RNA guide sequence portion
aauugcaaguccccaagcugca

SEQ ID NO: 5280 - RNA, 22 nt, Artificial Sequence
  C3-targeting RNA guide sequence portion
aauuggaguuugggauguuucu

SEQ ID NO: 5281 - RNA, 22 nt, Artificial Sequence
  C3-targeting RNA guide sequence portion
aauuuucaguguggguuuaaag

SEQ ID NO: 5282 - RNA, 22 nt, Artificial Sequence
  C3-targeting RNA guide sequence portion
acaaacacccaaaugcacccug

SEQ ID NO: 5283 - RNA, 22 nt, Artificial Sequence
  C3-targeting RNA guide sequence portion
acaaacacccaacccauaaaca

SEQ ID NO: 5284 - RNA, 22 nt, Artificial Sequence
  C3-targeting RNA guide sequence portion
acaaacagggcugguucugggg

SEQ ID NO: 5285 - RNA, 22 nt, Artificial Sequence
  C3-targeting RNA guide sequence portion
acaagauuugggaguuugcagc

SEQ ID NO: 5286 - RNA, 22 nt, Artificial Sequence
  C3-targeting RNA guide sequence portion
acaagcccacucccgugcccca

SEQ ID NO: 5287 - RNA, 22 nt, Artificial Sequence
  C3-targeting RNA guide sequence portion
acaaucaauuccaaaugcccca

SEQ ID NO: 5288 - RNA, 22 nt, Artificial Sequence
  C3-targeting RNA guide sequence portion
acaaucgccuaaacccacacau

SEQ ID NO: 5289 - RNA, 22 nt, Artificial Sequence
  C3-targeting RNA guide sequence portion
acacagccugccaggcgcugac

SEQ ID NO: 5290 - RNA, 22 nt, Artificial Sequence
  C3-targeting RNA guide sequence portion
acacaucccaccaaacccugaa

SEQ ID NO: 5291 - RNA, 22 nt, Artificial Sequence
  C3-targeting RNA guide sequence portion
acacaugccccaaacccuaaac

SEQ ID NO: 5292 - RNA, 22 nt, Artificial Sequence
  C3-targeting RNA guide sequence portion
acaccacauacacccuaaacca

SEQ ID NO: 5293 - RNA, 22 nt, Artificial Sequence
  C3-targeting RNA guide sequence portion
acacccaaacucacaggcagcc

SEQ ID NO: 5294 - RNA, 22 nt, Artificial Sequence
  C3-targeting RNA guide sequence portion
acacccaaacucucaggcagcc

SEQ ID NO: 5295 - RNA, 22 nt, Artificial Sequence
  C3-targeting RNA guide sequence portion
acacccaaaugcacccugaauu

SEQ ID NO: 5296 - RNA, 22 nt, Artificial Sequence
  C3-targeting RNA guide sequence portion
acacccaacccauaaacaccca

SEQ ID NO: 5297 - RNA, 22 nt, Artificial Sequence
  C3-targeting RNA guide sequence portion
acaccccaguccuaauaaauac

SEQ ID NO: 5298 - RNA, 22 nt, Artificial Sequence
  C3-targeting RNA guide sequence portion
acacccuaaaccaacagaugac

SEQ ID NO: 5299 - RNA, 22 nt, Artificial Sequence
  C3-targeting RNA guide sequence portion
acacccucaacucuaccuaccc

SEQ ID NO: 5300 - RNA, 22 nt, Artificial Sequence
  C3-targeting RNA guide sequence portion
acacucaaacucccggacaccc

SEQ ID NO: 5301 - RNA, 22 nt, Artificial Sequence
  C3-targeting RNA guide sequence portion
acacuccaaauauguaaacacu

SEQ ID NO: 5302 - RNA, 22 nt, Artificial Sequence
  C3-targeting RNA guide sequence portion
acacugaaaauugcaagucccc

SEQ ID NO: 5303 - RNA, 22 nt, Artificial Sequence
  C3-targeting RNA guide sequence portion
acagaugaccucaauucuagaa

SEQ ID NO: 5304 - RNA, 22 nt, Artificial Sequence
  C3-targeting RNA guide sequence portion
acagcagccaccaugacuccca

SEQ ID NO: 5305 - RNA, 22 nt, Artificial Sequence
  C3-targeting RNA guide sequence portion
acagccugccaggcgcugacuc

SEQ ID NO: 5306 - RNA, 22 nt, Artificial Sequence
  C3-targeting RNA guide sequence portion
acaggcagcccaaauauauaua

SEQ ID NO: 5307 - RNA, 22 nt, Artificial Sequence
  C3-targeting RNA guide sequence portion
acaggcagcccaaauguauaua

SEQ ID NO: 5308 - RNA, 22 nt, Artificial Sequence
  C3-targeting RNA guide sequence portion
acagggaccuggacccccaaau

SEQ ID NO: 5309 - RNA, 22 nt, Artificial Sequence
  C3-targeting RNA guide sequence portion
acagggcugguucuggggugga

SEQ ID NO: 5310 - RNA, 22 nt, Artificial Sequence
  C3-targeting RNA guide sequence portion
acauacacccuaaaccaacaga

SEQ ID NO: 5311 - RNA, 22 nt, Artificial Sequence
  C3-targeting RNA guide sequence portion
acauacgccaaaaccucuaaac

SEQ ID NO: 5312 - RNA, 22 nt, Artificial Sequence
  C3-targeting RNA guide sequence portion
acauauuuggaguguuuagaga

SEQ ID NO: 5313 - RNA, 22 nt, Artificial Sequence
  C3-targeting RNA guide sequence portion
acaucccaaacuccaauuccac

SEQ ID NO: 5314 - RNA, 22 nt, Artificial Sequence
  C3-targeting RNA guide sequence portion
acaucccaccaaacccugaacc

SEQ ID NO: 5315 - RNA, 22 nt, Artificial Sequence
  C3-targeting RNA guide sequence portion
acauccguggaaugacaagccc

SEQ ID NO: 5316 - RNA, 22 nt, Artificial Sequence
  C3-targeting RNA guide sequence portion
acaugaacccgaaguagccaau

SEQ ID NO: 5317 - RNA, 22 nt, Artificial Sequence
  C3-targeting RNA guide sequence portion
acaugccccaaacccuaaaccu

SEQ ID NO: 5318 - RNA, 22 nt, Artificial Sequence
  C3-targeting RNA guide sequence portion
acaugggcaggacagcagccac

SEQ ID NO: 5319 - RNA, 22 nt, Artificial Sequence
  C3-targeting RNA guide sequence portion
acauuugggcugccugagaguu

SEQ ID NO: 5320 - RNA, 22 nt, Artificial Sequence
  C3-targeting RNA guide sequence portion
acauuugggcugccugugaguu

SEQ ID NO: 5321 - RNA, 22 nt, Artificial Sequence
  C3-targeting RNA guide sequence portion
acauuuggggguccaggucccu

SEQ ID NO: 5322 - RNA, 22 nt, Artificial Sequence
  C3-targeting RNA guide sequence portion
accaaacccugaaccuuccaac

SEQ ID NO: 5323 - RNA, 22 nt, Artificial Sequence
  C3-targeting RNA guide sequence portion
accaacagaugaccucaauucu

SEQ ID NO: 5324 - RNA, 22 nt, Artificial Sequence
  C3-targeting RNA guide sequence portion
accacauacacccuaaaccaac

SEQ ID NO: 5325 - RNA, 22 nt, Artificial Sequence
  C3-targeting RNA guide sequence portion
accacaugggcaggacagcagc

SEQ ID NO: 5326 - RNA, 22 nt, Artificial Sequence
  C3-targeting RNA guide sequence portion
accagaggcuggggcacacagc

SEQ ID NO: 5327 - RNA, 22 nt, Artificial Sequence
  C3-targeting RNA guide sequence portion
accagcccuguuuguggguaga

SEQ ID NO: 5328 - RNA, 22 nt, Artificial Sequence
  C3-targeting RNA guide sequence portion
accagcgucagcaacuccucca

SEQ ID NO: 5329 - RNA, 22 nt, Artificial Sequence
  C3-targeting RNA guide sequence portion
accauaccuggauuccacaaac

SEQ ID NO: 5330 - RNA, 22 nt, Artificial Sequence
  C3-targeting RNA guide sequence portion
accaucaaugaacaccacauac

SEQ ID NO: 5331 - RNA, 22 nt, Artificial Sequence
  C3-targeting RNA guide sequence portion
accaugacucccacucucagcc

SEQ ID NO: 5332 - RNA, 22 nt, Artificial Sequence
  C3-targeting RNA guide sequence portion
acccaaacccacauacgccaaa

SEQ ID NO: 5333 - RNA, 22 nt, Artificial Sequence
  C3-targeting RNA guide sequence portion
acccaaacucacaggcagccca

SEQ ID NO: 5334 - RNA, 22 nt, Artificial Sequence
  C3-targeting RNA guide sequence portion
acccaaacucucaggcagccca

SEQ ID NO: 5335 - RNA, 22 nt, Artificial Sequence
  C3-targeting RNA guide sequence portion
acccaaaugcacccugaauucu

SEQ ID NO: 5336 - RNA, 22 nt, Artificial Sequence
  C3-targeting RNA guide sequence portion
acccaacccauaaacacccaaa

SEQ ID NO: 5337 - RNA, 22 nt, Artificial Sequence
  C3-targeting RNA guide sequence portion
acccacaaacagggcugguucu

SEQ ID NO: 5338 - RNA, 22 nt, Artificial Sequence
  C3-targeting RNA guide sequence portion
acccacaaucgccuaaacccac

SEQ ID NO: 5339 - RNA, 22 nt, Artificial Sequence
  C3-targeting RNA guide sequence portion
acccacacaugccccaaacccu

SEQ ID NO: 5340 - RNA, 22 nt, Artificial Sequence
  C3-targeting RNA guide sequence portion
acccacacugaaaauugcaagu

SEQ ID NO: 5341 - RNA, 22 nt, Artificial Sequence
  C3-targeting RNA guide sequence portion
acccacauacgccaaaaccucu

SEQ ID NO: 5342 - RNA, 22 nt, Artificial Sequence
  C3-targeting RNA guide sequence portion
acccagccuaaaccuccaacac

SEQ ID NO: 5343 - RNA, 22 nt, Artificial Sequence
  C3-targeting RNA guide sequence portion
acccauaaacacccaaacucuc

SEQ ID NO: 5344 - RNA, 22 nt, Artificial Sequence
  C3-targeting RNA guide sequence portion
accccaaacccagccuaaaccu

SEQ ID NO: 5345 - RNA, 22 nt, Artificial Sequence
  C3-targeting RNA guide sequence portion
accccagaaccagcccuguuug

SEQ ID NO: 5346 - RNA, 22 nt, Artificial Sequence
  C3-targeting RNA guide sequence portion
accccaguccuaauaaauacaa

SEQ ID NO: 5347 - RNA, 22 nt, Artificial Sequence
  C3-targeting RNA guide sequence portion
acccccaaaugucugcuuccac

SEQ ID NO: 5348 - RNA, 22 nt, Artificial Sequence
  C3-targeting RNA guide sequence portion
acccccaaccgcaccaucaaug

SEQ ID NO: 5349 - RNA, 22 nt, Artificial Sequence
  C3-targeting RNA guide sequence portion
accccugaauccacaaacaccc

SEQ ID NO: 5350 - RNA, 22 nt, Artificial Sequence
  C3-targeting RNA guide sequence portion
acccgaaguagccaaucuuuaa

SEQ ID NO: 5351 - RNA, 22 nt, Artificial Sequence
  C3-targeting RNA guide sequence portion
acccuaaaccaacagaugaccu

SEQ ID NO: 5352 - RNA, 22 nt, Artificial Sequence
  C3-targeting RNA guide sequence portion
acccuaaaccucuaccucucua

SEQ ID NO: 5353 - RNA, 22 nt, Artificial Sequence
  C3-targeting RNA guide sequence portion
acccucaacucuaccuacccaa

SEQ ID NO: 5354 - RNA, 22 nt, Artificial Sequence
  C3-targeting RNA guide sequence portion
acccugaaccuuccaaccagcg

SEQ ID NO: 5355 - RNA, 22 nt, Artificial Sequence
  C3-targeting RNA guide sequence portion
acccugaauucuacagggaccu

SEQ ID NO: 5356 - RNA, 22 nt, Artificial Sequence
  C3-targeting RNA guide sequence portion
accgcaccaucaaugaacacca

SEQ ID NO: 5357 - RNA, 22 nt, Artificial Sequence
  C3-targeting RNA guide sequence portion
accgucucaaccacaugggcag

SEQ ID NO: 5358 - RNA, 22 nt, Artificial Sequence
  C3-targeting RNA guide sequence portion
accuacccaaacccacauacgc

SEQ ID NO: 5359 - RNA, 22 nt, Artificial Sequence
  C3-targeting RNA guide sequence portion
accucaaaucuuagagcacccc

SEQ ID NO: 5360 - RNA, 22 nt, Artificial Sequence
  C3-targeting RNA guide sequence portion
accucaauucuagaaacauccc

SEQ ID NO: 5361 - RNA, 22 nt, Artificial Sequence
  C3-targeting RNA guide sequence portion
accuccaacaccccaguccuaa

SEQ ID NO: 5362 - RNA, 22 nt, Artificial Sequence
  C3-targeting RNA guide sequence portion
accucuaaaccucaaaucuuag

SEQ ID NO: 5363 - RNA, 22 nt, Artificial Sequence
  C3-targeting RNA guide sequence portion
accucuaccucucuaaacacuc

SEQ ID NO: 5364 - RNA, 22 nt, Artificial Sequence
  C3-targeting RNA guide sequence portion
accucucuaaacacuccaaaua

SEQ ID NO: 5365 - RNA, 22 nt, Artificial Sequence
  C3-targeting RNA guide sequence portion
accugcuaaccccugaauccac

SEQ ID NO: 5366 - RNA, 22 nt, Artificial Sequence
  C3-targeting RNA guide sequence portion
accuggacccccaaaugucugc

SEQ ID NO: 5367 - RNA, 22 nt, Artificial Sequence
  C3-targeting RNA guide sequence portion
accuggauuccacaaacaccca

SEQ ID NO: 5368 - RNA, 22 nt, Artificial Sequence
  C3-targeting RNA guide sequence portion
accuuccaaccagcgucagcaa

SEQ ID NO: 5369 - RNA, 22 nt, Artificial Sequence
  C3-targeting RNA guide sequence portion
acgagggggccacacaucccac

SEQ ID NO: 5370 - RNA, 22 nt, Artificial Sequence
  C3-targeting RNA guide sequence portion
acgauaccuggauuccacaaac

SEQ ID NO: 5371 - RNA, 22 nt, Artificial Sequence
  C3-targeting RNA guide sequence portion
acgccaaaaccucuaaaccuca

SEQ ID NO: 5372 - RNA, 22 nt, Artificial Sequence
  C3-targeting RNA guide sequence portion
acgccaguccucacuggaguca

SEQ ID NO: 5373 - RNA, 22 nt, Artificial Sequence
  C3-targeting RNA guide sequence portion
acgcugguuggaagguucaggg

SEQ ID NO: 5374 - RNA, 22 nt, Artificial Sequence
  C3-targeting RNA guide sequence portion
acggaugugagacgccaguccu

SEQ ID NO: 5375 - RNA, 22 nt, Artificial Sequence
  C3-targeting RNA guide sequence portion
acgggagugggcuugucauucc

SEQ ID NO: 5376 - RNA, 22 nt, Artificial Sequence
  C3-targeting RNA guide sequence portion
acgguggcagugcccagagaag

SEQ ID NO: 5377 - RNA, 22 nt, Artificial Sequence
  C3-targeting RNA guide sequence portion
acuauacaugaacccgaaguag

SEQ ID NO: 5378 - RNA, 22 nt, Artificial Sequence
  C3-targeting RNA guide sequence portion
acucaaacucccggacacccuc

SEQ ID NO: 5379 - RNA, 22 nt, Artificial Sequence
  C3-targeting RNA guide sequence portion
acucacaggcagcccaaauaua

SEQ ID NO: 5380 - RNA, 22 nt, Artificial Sequence
  C3-targeting RNA guide sequence portion
acucacaggcagcccaaaugua

SEQ ID NO: 5381 - RNA, 22 nt, Artificial Sequence
  C3-targeting RNA guide sequence portion
acuccaaauauguaaacacuca

SEQ ID NO: 5382 - RNA, 22 nt, Artificial Sequence
  C3-targeting RNA guide sequence portion
acuccaauuccaccauaccugg

SEQ ID NO: 5383 - RNA, 22 nt, Artificial Sequence
  C3-targeting RNA guide sequence portion
acuccaauuccacgauaccugg

SEQ ID NO: 5384 - RNA, 22 nt, Artificial Sequence
  C3-targeting RNA guide sequence portion
acuccaauuccaugauaccugg

SEQ ID NO: 5385 - RNA, 22 nt, Artificial Sequence
  C3-targeting RNA guide sequence portion
acuccagugaggacuggcgucu

SEQ ID NO: 5386 - RNA, 22 nt, Artificial Sequence
  C3-targeting RNA guide sequence portion
acucccaaaucuuguaaagucc

SEQ ID NO: 5387 - RNA, 22 nt, Artificial Sequence
  C3-targeting RNA guide sequence portion
acucccacucucagccagcugg

SEQ ID NO: 5388 - RNA, 22 nt, Artificial Sequence
  C3-targeting RNA guide sequence portion
acucccggacacccucaacucu

SEQ ID NO: 5389 - RNA, 22 nt, Artificial Sequence
  C3-targeting RNA guide sequence portion
acuccuccaagucucuggacuu

SEQ ID NO: 5390 - RNA, 22 nt, Artificial Sequence
  C3-targeting RNA guide sequence portion
acucggagguuuggacuuuaca

SEQ ID NO: 5391 - RNA, 22 nt, Artificial Sequence
  C3-targeting RNA guide sequence portion
acucuacccacaaacagggcug

SEQ ID NO: 5392 - RNA, 22 nt, Artificial Sequence
  C3-targeting RNA guide sequence portion
acucuaccuacccaaacccaca

SEQ ID NO: 5393 - RNA, 22 nt, Artificial Sequence
  C3-targeting RNA guide sequence portion
acucucagccagcugggccugg

SEQ ID NO: 5394 - RNA, 22 nt, Artificial Sequence
  C3-targeting RNA guide sequence portion
acucucaggcagcccaaaugua

SEQ ID NO: 5395 - RNA, 22 nt, Artificial Sequence
  C3-targeting RNA guide sequence portion
acugaaaauugcaaguccccaa

SEQ ID NO: 5396 - RNA, 22 nt, Artificial Sequence
  C3-targeting RNA guide sequence portion
acugccaccgucucaaccacau

SEQ ID NO: 5397 - RNA, 22 nt, Artificial Sequence
  C3-targeting RNA guide sequence portion
acugccggcgcacuugccaaug

SEQ ID NO: 5398 - RNA, 22 nt, Artificial Sequence
  C3-targeting RNA guide sequence portion
acuggagucagcgccuggcagg

SEQ ID NO: 5399 - RNA, 22 nt, Artificial Sequence
  C3-targeting RNA guide sequence portion
acuggauccucuccaggaccag

SEQ ID NO: 5400 - RNA, 22 nt, Artificial Sequence
  C3-targeting RNA guide sequence portion
acuggcgucucacauccgugga

SEQ ID NO: 5401 - RNA, 22 nt, Artificial Sequence
  C3-targeting RNA guide sequence portion
acugggguguuggagguuuagg

SEQ ID NO: 5402 - RNA, 22 nt, Artificial Sequence
  C3-targeting RNA guide sequence portion
acuuccagacccacaaucgccu

SEQ ID NO: 5403 - RNA, 22 nt, Artificial Sequence
  C3-targeting RNA guide sequence portion
acuucggguucauguauaguug

SEQ ID NO: 5404 - RNA, 22 nt, Artificial Sequence
  C3-targeting RNA guide sequence portion
acuugcaauuuucagugugggu

SEQ ID NO: 5405 - RNA, 22 nt, Artificial Sequence
  C3-targeting RNA guide sequence portion
acuugccaaugccauuaucuuc

SEQ ID NO: 5406 - RNA, 22 nt, Artificial Sequence
  C3-targeting RNA guide sequence portion
acuuggaggaguugcugacgcu

SEQ ID NO: 5407 - RNA, 22 nt, Artificial Sequence
  C3-targeting RNA guide sequence portion
acuuuacaagauuugggaguuu

SEQ ID NO: 5408 - RNA, 22 nt, Artificial Sequence
  C3-targeting RNA guide sequence portion
agaaacaucccaaacuccaauu

SEQ ID NO: 5409 - RNA, 22 nt, Artificial Sequence
  C3-targeting RNA guide sequence portion
agaaccagcccuguuugugggu

SEQ ID NO: 5410 - RNA, 22 nt, Artificial Sequence
  C3-targeting RNA guide sequence portion
agaagauaauggcauuggcaag

SEQ ID NO: 5411 - RNA, 22 nt, Artificial Sequence
  C3-targeting RNA guide sequence portion
agaauucagggugcauuugggu

SEQ ID NO: 5412 - RNA, 22 nt, Artificial Sequence
  C3-targeting RNA guide sequence portion
agaauugaggucaucuguuggu

SEQ ID NO: 5413 - RNA, 22 nt, Artificial Sequence
  C3-targeting RNA guide sequence portion
agacauuuggggguccaggucc

SEQ ID NO: 5414 - RNA, 22 nt, Artificial Sequence
  C3-targeting RNA guide sequence portion
agacccacaaucgccuaaaccc

SEQ ID NO: 5415 - RNA, 22 nt, Artificial Sequence
  C3-targeting RNA guide sequence portion
agacgccaguccucacuggagu

SEQ ID NO: 5416 - RNA, 22 nt, Artificial Sequence
  C3-targeting RNA guide sequence portion
agacgguggcagugcccagaga

SEQ ID NO: 5417 - RNA, 22 nt, Artificial Sequence
  C3-targeting RNA guide sequence portion
agacucggagguuuggacuuua

SEQ ID NO: 5418 - RNA, 22 nt, Artificial Sequence
  C3-targeting RNA guide sequence portion
agacuuggaggaguugcugacg

SEQ ID NO: 5419 - RNA, 22 nt, Artificial Sequence
  C3-targeting RNA guide sequence portion
agagaagauaauggcauuggca

SEQ ID NO: 5420 - RNA, 22 nt, Artificial Sequence
  C3-targeting RNA guide sequence portion
agagacuuggaggaguugcuga

SEQ ID NO: 5421 - RNA, 22 nt, Artificial Sequence
  C3-targeting RNA guide sequence portion
agagagguagagguuuaggguu

SEQ ID NO: 5422 - RNA, 22 nt, Artificial Sequence
  C3-targeting RNA guide sequence portion
agagcaccccaaacccagccua

SEQ ID NO: 5423 - RNA, 22 nt, Artificial Sequence
  C3-targeting RNA guide sequence portion
agaggauccagugacugccggc

SEQ ID NO: 5424 - RNA, 22 nt, Artificial Sequence
  C3-targeting RNA guide sequence portion
agaggcuggggcacacagccug

SEQ ID NO: 5425 - RNA, 22 nt, Artificial Sequence
  C3-targeting RNA guide sequence portion
agagguagagguuuaggguuug

SEQ ID NO: 5426 - RNA, 22 nt, Artificial Sequence
  C3-targeting RNA guide sequence portion
agagguuuaggguuuggggcau

SEQ ID NO: 5427 - RNA, 22 nt, Artificial Sequence
  C3-targeting RNA guide sequence portion
agagguuuuggcguaugugggu

SEQ ID NO: 5428 - RNA, 22 nt, Artificial Sequence
  C3-targeting RNA guide sequence portion
agagugggagucaugguggcug

SEQ ID NO: 5429 - RNA, 22 nt, Artificial Sequence
  C3-targeting RNA guide sequence portion
agaguugaggguguccgggagu

SEQ ID NO: 5430 - RNA, 22 nt, Artificial Sequence
  C3-targeting RNA guide sequence portion
agaguuuggguguuuauggguu

SEQ ID NO: 5431 - RNA, 22 nt, Artificial Sequence
  C3-targeting RNA guide sequence portion
agauaauggcauuggcaagugc

SEQ ID NO: 5432 - RNA, 22 nt, Artificial Sequence
  C3-targeting RNA guide sequence portion
agaugaccucaauucuagaaac

SEQ ID NO: 5433 - RNA, 22 nt, Artificial Sequence
  C3-targeting RNA guide sequence portion
agauuggcuacuucggguucau

SEQ ID NO: 5434 - RNA, 22 nt, Artificial Sequence
  C3-targeting RNA guide sequence portion
agauuugagguuuagagguuuu

SEQ ID NO: 5435 - RNA, 22 nt, Artificial Sequence
  C3-targeting RNA guide sequence portion
agauuugggaguuugcagcuug

SEQ ID NO: 5436 - RNA, 22 nt, Artificial Sequence
  C3-targeting RNA guide sequence portion
agcaacuccuccaagucucugg

SEQ ID NO: 5437 - RNA, 22 nt, Artificial Sequence
  C3-targeting RNA guide sequence portion
agcaccccaaacccagccuaaa

SEQ ID NO: 5438 - RNA, 22 nt, Artificial Sequence
  C3-targeting RNA guide sequence portion
agcagacauuuggggguccagg

SEQ ID NO: 5439 - RNA, 22 nt, Artificial Sequence
  C3-targeting RNA guide sequence portion
agcagccaccaugacucccacu

SEQ ID NO: 5440 - RNA, 22 nt, Artificial Sequence
  C3-targeting RNA guide sequence portion
agccaaucuuuaaacccacacu

SEQ ID NO: 5441 - RNA, 22 nt, Artificial Sequence
  C3-targeting RNA guide sequence portion
agccaccaugacucccacucuc

SEQ ID NO: 5442 - RNA, 22 nt, Artificial Sequence
  C3-targeting RNA guide sequence portion
agccagcugggccuggccuuug

SEQ ID NO: 5443 - RNA, 22 nt, Artificial Sequence
  C3-targeting RNA guide sequence portion
agcccaaauauauauaaucauu

SEQ ID NO: 5444 - RNA, 22 nt, Artificial Sequence
  C3-targeting RNA guide sequence portion
agcccacucccgugccccacuc

SEQ ID NO: 5445 - RNA, 22 nt, Artificial Sequence
  C3-targeting RNA guide sequence portion
agcccuguuuguggguagaguc

SEQ ID NO: 5446 - RNA, 22 nt, Artificial Sequence
  C3-targeting RNA guide sequence portion
agccuaaaccuccaacacccca

SEQ ID NO: 5447 - RNA, 22 nt, Artificial Sequence
  C3-targeting RNA guide sequence portion
agccucugguccuggagaggau

SEQ ID NO: 5448 - RNA, 22 nt, Artificial Sequence
  C3-targeting RNA guide sequence portion
agccugccaggcgcugacucca

SEQ ID NO: 5449 - RNA, 22 nt, Artificial Sequence
  C3-targeting RNA guide sequence portion
agccugggcaacgagggggcca

SEQ ID NO: 5450 - RNA, 22 nt, Artificial Sequence
  C3-targeting RNA guide sequence portion
agcgccuggcaggcugugugcc

SEQ ID NO: 5451 - RNA, 22 nt, Artificial Sequence
  C3-targeting RNA guide sequence portion
agcgucagcaacuccuccaagu

SEQ ID NO: 5452 - RNA, 22 nt, Artificial Sequence
  C3-targeting RNA guide sequence portion
agcugcaaacucccaaaucuug

SEQ ID NO: 5453 - RNA, 22 nt, Artificial Sequence
  C3-targeting RNA guide sequence portion
agcuggcugagagugggaguca

SEQ ID NO: 5454 - RNA, 22 nt, Artificial Sequence
  C3-targeting RNA guide sequence portion
agcugggccuggccuuugaaag

SEQ ID NO: 5455 - RNA, 22 nt, Artificial Sequence
  C3-targeting RNA guide sequence portion
agcuuggggacuugcaauuuuc

SEQ ID NO: 5456 - RNA, 22 nt, Artificial Sequence
  C3-targeting RNA guide sequence portion
aggacagcagccaccaugacuc

SEQ ID NO: 5457 - RNA, 22 nt, Artificial Sequence
  C3-targeting RNA guide sequence portion
aggaccagaggcuggggcacac

SEQ ID NO: 5458 - RNA, 22 nt, Artificial Sequence
  C3-targeting RNA guide sequence portion
aggacuggcgucucacauccgu

SEQ ID NO: 5459 - RNA, 22 nt, Artificial Sequence
  C3-targeting RNA guide sequence portion
aggacugggguguuggagguuu

SEQ ID NO: 5460 - RNA, 22 nt, Artificial Sequence
  C3-targeting RNA guide sequence portion
aggaguugcugacgcugguugg

SEQ ID NO: 5461 - RNA, 22 nt, Artificial Sequence
  C3-targeting RNA guide sequence portion
aggauccagugacugccggcgc

SEQ ID NO: 5462 - RNA, 22 nt, Artificial Sequence
  C3-targeting RNA guide sequence portion
aggcagcccaaauauauauaau

SEQ ID NO: 5463 - RNA, 22 nt, Artificial Sequence
  C3-targeting RNA guide sequence portion
aggccaggcccagcuggcugag

SEQ ID NO: 5464 - RNA, 22 nt, Artificial Sequence
  C3-targeting RNA guide sequence portion
aggcccagcuggcugagagugg

SEQ ID NO: 5465 - RNA, 22 nt, Artificial Sequence
  C3-targeting RNA guide sequence portion
aggcgauugugggucuggaagu

SEQ ID NO: 5466 - RNA, 22 nt, Artificial Sequence
  C3-targeting RNA guide sequence portion
aggcgcugacuccagugaggac

SEQ ID NO: 5467 - RNA, 22 nt, Artificial Sequence
  C3-targeting RNA guide sequence portion
aggcuggggcacacagccugcc

SEQ ID NO: 5468 - RNA, 22 nt, Artificial Sequence
  C3-targeting RNA guide sequence portion
aggcuggguuuggggugcucua

SEQ ID NO: 5469 - RNA, 22 nt, Artificial Sequence
  C3-targeting RNA guide sequence portion
aggcugugugccccagccucug

SEQ ID NO: 5470 - RNA, 22 nt, Artificial Sequence
  C3-targeting RNA guide sequence portion
aggcuuucaaaggccaggccca

SEQ ID NO: 5471 - RNA, 22 nt, Artificial Sequence
  C3-targeting RNA guide sequence portion
agggaccuggacccccaaaugu

SEQ ID NO: 5472 - RNA, 22 nt, Artificial Sequence
  C3-targeting RNA guide sequence portion
agggcugguucugggguggaag

SEQ ID NO: 5473 - RNA, 22 nt, Artificial Sequence
  C3-targeting RNA guide sequence portion
agggggccacacaucccaccaa

SEQ ID NO: 5474 - RNA, 22 nt, Artificial Sequence
  C3-targeting RNA guide sequence portion
agggguuagcagguugggaaug

SEQ ID NO: 5475 - RNA, 22 nt, Artificial Sequence
  C3-targeting RNA guide sequence portion
agggugcauuuggguguuugug

SEQ ID NO: 5476 - RNA, 22 nt, Artificial Sequence
  C3-targeting RNA guide sequence portion
aggguguaugugguguucauug

SEQ ID NO: 5477 - RNA, 22 nt, Artificial Sequence
  C3-targeting RNA guide sequence portion
aggguguccgggaguuugagug

SEQ ID NO: 5478 - RNA, 22 nt, Artificial Sequence
  C3-targeting RNA guide sequence portion
aggguuuggggcaugugugggu

SEQ ID NO: 5479 - RNA, 22 nt, Artificial Sequence
  C3-targeting RNA guide sequence portion
aggguuuggugggauguguggc

SEQ ID NO: 5480 - RNA, 22 nt, Artificial Sequence
  C3-targeting RNA guide sequence portion
agguagagguuuaggguuuggg

SEQ ID NO: 5481 - RNA, 22 nt, Artificial Sequence
  C3-targeting RNA guide sequence portion
agguagaguugaggguguccgg

SEQ ID NO: 5482 - RNA, 22 nt, Artificial Sequence
  C3-targeting RNA guide sequence portion
agguaucauggaauuggaguuu

SEQ ID NO: 5483 - RNA, 22 nt, Artificial Sequence
  C3-targeting RNA guide sequence portion
agguaucguggaauuggaguuu

SEQ ID NO: 5484 - RNA, 22 nt, Artificial Sequence
  C3-targeting RNA guide sequence portion
agguaugguggaauuggaguuu

SEQ ID NO: 5485 - RNA, 22 nt, Artificial Sequence
  C3-targeting RNA guide sequence portion
aggucaucuguugguuuagggu

SEQ ID NO: 5486 - RNA, 22 nt, Artificial Sequence
  C3-targeting RNA guide sequence portion
aggucccuguagaauucagggu

SEQ ID NO: 5487 - RNA, 22 nt, Artificial Sequence
  C3-targeting RNA guide sequence portion
agguucaggguuuggugggaug

SEQ ID NO: 5488 - RNA, 22 nt, Artificial Sequence
  C3-targeting RNA guide sequence portion
agguugggaaugauuauauaua

SEQ ID NO: 5489 - RNA, 22 nt, Artificial Sequence
  C3-targeting RNA guide sequence portion
agguuuagagguuuuggcguau

SEQ ID NO: 5490 - RNA, 22 nt, Artificial Sequence
  C3-targeting RNA guide sequence portion
agguuuaggcuggguuuggggu

SEQ ID NO: 5491 - RNA, 22 nt, Artificial Sequence
  C3-targeting RNA guide sequence portion
agguuuaggguuuggggcaugu

SEQ ID NO: 5492 - RNA, 22 nt, Artificial Sequence
  C3-targeting RNA guide sequence portion
agguuuggacuuuacaagauuu

SEQ ID NO: 5493 - RNA, 22 nt, Artificial Sequence
  C3-targeting RNA guide sequence portion
agguuuuggcguauguggguuu

SEQ ID NO: 5494 - RNA, 22 nt, Artificial Sequence
  C3-targeting RNA guide sequence portion
aguagccaaucuuuaaacccac

SEQ ID NO: 5495 - RNA, 22 nt, Artificial Sequence
  C3-targeting RNA guide sequence portion
agucacuggauccucuccagga

SEQ ID NO: 5496 - RNA, 22 nt, Artificial Sequence
  C3-targeting RNA guide sequence portion
agucagcgccuggcaggcugug

SEQ ID NO: 5497 - RNA, 22 nt, Artificial Sequence
  C3-targeting RNA guide sequence portion
agucaugguggcugcuguccug

SEQ ID NO: 5498 - RNA, 22 nt, Artificial Sequence
  C3-targeting RNA guide sequence portion
aguccagagacuuggaggaguu

SEQ ID NO: 5499 - RNA, 22 nt, Artificial Sequence
  C3-targeting RNA guide sequence portion
aguccccaagcugcaaacuccc

SEQ ID NO: 5500 - RNA, 22 nt, Artificial Sequence
  C3-targeting RNA guide sequence portion
aguccucacuggagucagcgcc

SEQ ID NO: 5501 - RNA, 22 nt, Artificial Sequence
  C3-targeting RNA guide sequence portion
agucucuggacuuccagaccca

SEQ ID NO: 5502 - RNA, 22 nt, Artificial Sequence
  C3-targeting RNA guide sequence portion
agugacugccggcgcacuugcc

SEQ ID NO: 5503 - RNA, 22 nt, Artificial Sequence
  C3-targeting RNA guide sequence portion
agugaggacuggcgucucacau

SEQ ID NO: 5504 - RNA, 22 nt, Artificial Sequence
  C3-targeting RNA guide sequence portion
agugcccagagaagauaauggc

SEQ ID NO: 5505 - RNA, 22 nt, Artificial Sequence
  C3-targeting RNA guide sequence portion
agugcgccggcagucacuggau

SEQ ID NO: 5506 - RNA, 22 nt, Artificial Sequence
  C3-targeting RNA guide sequence portion
agugggagucaugguggcugcu

SEQ ID NO: 5507 - RNA, 22 nt, Artificial Sequence
  C3-targeting RNA guide sequence portion
agugggcuugucauuccacgga

SEQ ID NO: 5508 - RNA, 22 nt, Artificial Sequence
  C3-targeting RNA guide sequence portion
aguggggcacgggagugggcuu

SEQ ID NO: 5509 - RNA, 22 nt, Artificial Sequence
  C3-targeting RNA guide sequence portion
agugguuaugacucuacccaca

SEQ ID NO: 5510 - RNA, 22 nt, Artificial Sequence
  C3-targeting RNA guide sequence portion
aguguggguuuaaagauuggcu

SEQ ID NO: 5511 - RNA, 22 nt, Artificial Sequence
  C3-targeting RNA guide sequence portion
aguguuuacauauuuggagugu

SEQ ID NO: 5512 - RNA, 22 nt, Artificial Sequence
  C3-targeting RNA guide sequence portion
aguguuuagagagguagagguu

SEQ ID NO: 5513 - RNA, 22 nt, Artificial Sequence
  C3-targeting RNA guide sequence portion
aguugaggguguccgggaguuu

SEQ ID NO: 5514 - RNA, 22 nt, Artificial Sequence
  C3-targeting RNA guide sequence portion
aguugcugacgcugguuggaag

SEQ ID NO: 5515 - RNA, 22 nt, Artificial Sequence
  C3-targeting RNA guide sequence portion
aguuggggcauuuggaauugau

SEQ ID NO: 5516 - RNA, 22 nt, Artificial Sequence
  C3-targeting RNA guide sequence portion
aguuuauauacauuugggcugc

SEQ ID NO: 5517 - RNA, 22 nt, Artificial Sequence
  C3-targeting RNA guide sequence portion
aguuugaguguuuacauauuug

SEQ ID NO: 5518 - RNA, 22 nt, Artificial Sequence
  C3-targeting RNA guide sequence portion
aguuugcagcuuggggacuugc

SEQ ID NO: 5519 - RNA, 22 nt, Artificial Sequence
  C3-targeting RNA guide sequence portion
aguuugggauguuucuagaauu

SEQ ID NO: 5520 - RNA, 22 nt, Artificial Sequence
  C3-targeting RNA guide sequence portion
aguuuggguguuuauggguugg

SEQ ID NO: 5521 - RNA, 22 nt, Artificial Sequence
  C3-targeting RNA guide sequence portion
auaaacacccaaacucucaggc

SEQ ID NO: 5522 - RNA, 22 nt, Artificial Sequence
  C3-targeting RNA guide sequence portion
auaaacuccaauuccacgauac

SEQ ID NO: 5523 - RNA, 22 nt, Artificial Sequence
  C3-targeting RNA guide sequence portion
auaaacuccaauuccaugauac

SEQ ID NO: 5524 - RNA, 22 nt, Artificial Sequence
  C3-targeting RNA guide sequence portion
auaaauacaaucaauuccaaau

SEQ ID NO: 5525 - RNA, 22 nt, Artificial Sequence
  C3-targeting RNA guide sequence portion
auaaucauucccaaccugcuaa

SEQ ID NO: 5526 - RNA, 22 nt, Artificial Sequence
  C3-targeting RNA guide sequence portion
auaauggcauuggcaagugcgc

SEQ ID NO: 5527 - RNA, 22 nt, Artificial Sequence
  C3-targeting RNA guide sequence portion
auacaaucaauuccaaaugccc

SEQ ID NO: 5528 - RNA, 22 nt, Artificial Sequence
  C3-targeting RNA guide sequence portion
auacacccuaaaccaacagaug

SEQ ID NO: 5529 - RNA, 22 nt, Artificial Sequence
  C3-targeting RNA guide sequence portion
auacaugaacccgaaguagcca

SEQ ID NO: 5530 - RNA, 22 nt, Artificial Sequence
  C3-targeting RNA guide sequence portion
auacauuugggcugccugagag

SEQ ID NO: 5531 - RNA, 22 nt, Artificial Sequence
  C3-targeting RNA guide sequence portion
auacauuugggcugccugugag

SEQ ID NO: 5532 - RNA, 22 nt, Artificial Sequence
  C3-targeting RNA guide sequence portion
auaccuggauuccacaaacacc

SEQ ID NO: 5533 - RNA, 22 nt, Artificial Sequence
  C3-targeting RNA guide sequence portion
auacgccaaaaccucuaaaccu

SEQ ID NO: 5534 - RNA, 22 nt, Artificial Sequence
  C3-targeting RNA guide sequence portion
auaguuggggcauuuggaauug

SEQ ID NO: 5535 - RNA, 22 nt, Artificial Sequence
  C3-targeting RNA guide sequence portion
auauaaacuccaauuccacgau

SEQ ID NO: 5536 - RNA, 22 nt, Artificial Sequence
  C3-targeting RNA guide sequence portion
auauaaacuccaauuccaugau

SEQ ID NO: 5537 - RNA, 22 nt, Artificial Sequence
  C3-targeting RNA guide sequence portion
auauaaucauucccaaccugcu

SEQ ID NO: 5538 - RNA, 22 nt, Artificial Sequence
  C3-targeting RNA guide sequence portion
auauacauuugggcugccugag

SEQ ID NO: 5539 - RNA, 22 nt, Artificial Sequence
  C3-targeting RNA guide sequence portion
auauacauuugggcugccugug

SEQ ID NO: 5540 - RNA, 22 nt, Artificial Sequence
  C3-targeting RNA guide sequence portion
auauauaaucauucccaaccug

SEQ ID NO: 5541 - RNA, 22 nt, Artificial Sequence
  C3-targeting RNA guide sequence portion
auauauauuugggcugccugug

SEQ ID NO: 5542 - RNA, 22 nt, Artificial Sequence
  C3-targeting RNA guide sequence portion
auauauuugggcugccugugag

SEQ ID NO: 5543 - RNA, 22 nt, Artificial Sequence
  C3-targeting RNA guide sequence portion
auauguaaacacucaaacuccc

SEQ ID NO: 5544 - RNA, 22 nt, Artificial Sequence
  C3-targeting RNA guide sequence portion
auauuuggaguguuuagagagg

SEQ ID NO: 5545 - RNA, 22 nt, Artificial Sequence
  C3-targeting RNA guide sequence portion
auauuugggcugccugugaguu

SEQ ID NO: 5546 - RNA, 22 nt, Artificial Sequence
  C3-targeting RNA guide sequence portion
aucaaugaacaccacauacacc

SEQ ID NO: 5547 - RNA, 22 nt, Artificial Sequence
  C3-targeting RNA guide sequence portion
aucaauuccaaaugccccaacu

SEQ ID NO: 5548 - RNA, 22 nt, Artificial Sequence
  C3-targeting RNA guide sequence portion
aucauucccaaccugcuaaccc

SEQ ID NO: 5549 - RNA, 22 nt, Artificial Sequence
  C3-targeting RNA guide sequence portion
auccacaaacacccaaaugcac

SEQ ID NO: 5550 - RNA, 22 nt, Artificial Sequence
  C3-targeting RNA guide sequence portion
auccagguaucauggaauugga

SEQ ID NO: 5551 - RNA, 22 nt, Artificial Sequence
  C3-targeting RNA guide sequence portion
auccagguaucguggaauugga

SEQ ID NO: 5552 - RNA, 22 nt, Artificial Sequence
  C3-targeting RNA guide sequence portion
auccagguaugguggaauugga

SEQ ID NO: 5553 - RNA, 22 nt, Artificial Sequence
  C3-targeting RNA guide sequence portion
auccagugacugccggcgcacu

SEQ ID NO: 5554 - RNA, 22 nt, Artificial Sequence
  C3-targeting RNA guide sequence portion
aucccaaacuccaauuccacca

SEQ ID NO: 5555 - RNA, 22 nt, Artificial Sequence
  C3-targeting RNA guide sequence portion
aucccaccaaacccugaaccuu

SEQ ID NO: 5556 - RNA, 22 nt, Artificial Sequence
  C3-targeting RNA guide sequence portion
auccguggaaugacaagcccac

SEQ ID NO: 5557 - RNA, 22 nt, Artificial Sequence
  C3-targeting RNA guide sequence portion
auccucuccaggaccagaggcu

SEQ ID NO: 5558 - RNA, 22 nt, Artificial Sequence
  C3-targeting RNA guide sequence portion
aucgccuaaacccacacaugcc

SEQ ID NO: 5559 - RNA, 22 nt, Artificial Sequence
  C3-targeting RNA guide sequence portion
aucuguugguuuaggguguaug

SEQ ID NO: 5560 - RNA, 22 nt, Artificial Sequence
  C3-targeting RNA guide sequence portion
aucuuagagcaccccaaaccca

SEQ ID NO: 5561 - RNA, 22 nt, Artificial Sequence
  C3-targeting RNA guide sequence portion
aucuucucugggcacugccacc

SEQ ID NO: 5562 - RNA, 22 nt, Artificial Sequence
  C3-targeting RNA guide sequence portion
aucuuguaaaguccaaaccucc

SEQ ID NO: 5563 - RNA, 22 nt, Artificial Sequence
  C3-targeting RNA guide sequence portion
aucuuuaaacccacacugaaaa

SEQ ID NO: 5564 - RNA, 22 nt, Artificial Sequence
  C3-targeting RNA guide sequence portion
augaacaccacauacacccuaa

SEQ ID NO: 5565 - RNA, 22 nt, Artificial Sequence
  C3-targeting RNA guide sequence portion
augaacccgaaguagccaaucu

SEQ ID NO: 5566 - RNA, 22 nt, Artificial Sequence
  C3-targeting RNA guide sequence portion
augacaagcccacucccgugcc

SEQ ID NO: 5567 - RNA, 22 nt, Artificial Sequence
  C3-targeting RNA guide sequence portion
augaccucaauucuagaaacau

SEQ ID NO: 5568 - RNA, 22 nt, Artificial Sequence
  C3-targeting RNA guide sequence portion
augacucccacucucagccagc

SEQ ID NO: 5569 - RNA, 22 nt, Artificial Sequence
  C3-targeting RNA guide sequence portion
augacucuacccacaaacaggg

SEQ ID NO: 5570 - RNA, 22 nt, Artificial Sequence
  C3-targeting RNA guide sequence portion
augauaccuggauuccacaaac

SEQ ID NO: 5571 - RNA, 22 nt, Artificial Sequence
  C3-targeting RNA guide sequence portion
augauuauauauauuugggcug

SEQ ID NO: 5572 - RNA, 22 nt, Artificial Sequence
  C3-targeting RNA guide sequence portion
augcacccugaauucuacaggg

SEQ ID NO: 5573 - RNA, 22 nt, Artificial Sequence
  C3-targeting RNA guide sequence portion
augccauuaucuucucugggca

SEQ ID NO: 5574 - RNA, 22 nt, Artificial Sequence
  C3-targeting RNA guide sequence portion
augccccaaacccuaaaccucu

SEQ ID NO: 5575 - RNA, 22 nt, Artificial Sequence
  C3-targeting RNA guide sequence portion
augccccaacuauacaugaacc

SEQ ID NO: 5576 - RNA, 22 nt, Artificial Sequence
  C3-targeting RNA guide sequence portion
auggaauuggaguuuauauaca

SEQ ID NO: 5577 - RNA, 22 nt, Artificial Sequence
  C3-targeting RNA guide sequence portion
auggcauuggcaagugcgccgg

SEQ ID NO: 5578 - RNA, 22 nt, Artificial Sequence
  C3-targeting RNA guide sequence portion
augggcaggacagcagccacca

SEQ ID NO: 5579 - RNA, 22 nt, Artificial Sequence
  C3-targeting RNA guide sequence portion
auggguuggguguuuguggaau

SEQ ID NO: 5580 - RNA, 22 nt, Artificial Sequence
  C3-targeting RNA guide sequence portion
augguggaauuggaguuuggga

SEQ ID NO: 5581 - RNA, 22 nt, Artificial Sequence
  C3-targeting RNA guide sequence portion
augguggcugcuguccugccca

SEQ ID NO: 5582 - RNA, 22 nt, Artificial Sequence
  C3-targeting RNA guide sequence portion
auguaaacacucaaacucccgg

SEQ ID NO: 5583 - RNA, 22 nt, Artificial Sequence
  C3-targeting RNA guide sequence portion
auguauaguuggggcauuugga

SEQ ID NO: 5584 - RNA, 22 nt, Artificial Sequence
  C3-targeting RNA guide sequence portion
auguauauaaacuccaauucca

SEQ ID NO: 5585 - RNA, 22 nt, Artificial Sequence
  C3-targeting RNA guide sequence portion
augucugcuuccaccccagaac

SEQ ID NO: 5586 - RNA, 22 nt, Artificial Sequence
  C3-targeting RNA guide sequence portion
augugagacgccaguccucacu

SEQ ID NO: 5587 - RNA, 22 nt, Artificial Sequence
  C3-targeting RNA guide sequence portion
auguggguuuggguagguagag

SEQ ID NO: 5588 - RNA, 22 nt, Artificial Sequence
  C3-targeting RNA guide sequence portion
augugguguucauugauggugc

SEQ ID NO: 5589 - RNA, 22 nt, Artificial Sequence
  C3-targeting RNA guide sequence portion
augugguugagacgguggcagu

SEQ ID NO: 5590 - RNA, 22 nt, Artificial Sequence
  C3-targeting RNA guide sequence portion
auguguggcccccucguugccc

SEQ ID NO: 5591 - RNA, 22 nt, Artificial Sequence
  C3-targeting RNA guide sequence portion
auguguggguuuaggcgauugu

SEQ ID NO: 5592 - RNA, 22 nt, Artificial Sequence
  C3-targeting RNA guide sequence portion
auguuucuagaauugaggucau

SEQ ID NO: 5593 - RNA, 22 nt, Artificial Sequence
  C3-targeting RNA guide sequence portion
auuaggacugggguguuggagg

SEQ ID NO: 5594 - RNA, 22 nt, Artificial Sequence
  C3-targeting RNA guide sequence portion
auuauauauauuugggcugccu

SEQ ID NO: 5595 - RNA, 22 nt, Artificial Sequence
  C3-targeting RNA guide sequence portion
auuaucuucucugggcacugcc

SEQ ID NO: 5596 - RNA, 22 nt, Artificial Sequence
  C3-targeting RNA guide sequence portion
auucagggguuagcagguuggg

SEQ ID NO: 5597 - RNA, 22 nt, Artificial Sequence
  C3-targeting RNA guide sequence portion
auucagggugcauuuggguguu

SEQ ID NO: 5598 - RNA, 22 nt, Artificial Sequence
  C3-targeting RNA guide sequence portion
auuccaaaugccccaacuauac

SEQ ID NO: 5599 - RNA, 22 nt, Artificial Sequence
  C3-targeting RNA guide sequence portion
auuccacaaacacccaacccau

SEQ ID NO: 5600 - RNA, 22 nt, Artificial Sequence
  C3-targeting RNA guide sequence portion
auuccaccauaccuggauucca

SEQ ID NO: 5601 - RNA, 22 nt, Artificial Sequence
  C3-targeting RNA guide sequence portion
auuccacgauaccuggauucca

SEQ ID NO: 5602 - RNA, 22 nt, Artificial Sequence
  C3-targeting RNA guide sequence portion
auuccacggaugugagacgcca

SEQ ID NO: 5603 - RNA, 22 nt, Artificial Sequence
  C3-targeting RNA guide sequence portion
auuccaugauaccuggauucca

SEQ ID NO: 5604 - RNA, 22 nt, Artificial Sequence
  C3-targeting RNA guide sequence portion
auucccaaccugcuaaccccug

SEQ ID NO: 5605 - RNA, 22 nt, Artificial Sequence
  C3-targeting RNA guide sequence portion
auucuacagggaccuggacccc

SEQ ID NO: 5606 - RNA, 22 nt, Artificial Sequence
  C3-targeting RNA guide sequence portion
auucuagaaacaucccaaacuc

SEQ ID NO: 5607 - RNA, 22 nt, Artificial Sequence
  C3-targeting RNA guide sequence portion
auugaggucaucuguugguuua

SEQ ID NO: 5608 - RNA, 22 nt, Artificial Sequence
  C3-targeting RNA guide sequence portion
auugauuguauuuauuaggacu

SEQ ID NO: 5609 - RNA, 22 nt, Artificial Sequence
  C3-targeting RNA guide sequence portion
auugcaaguccccaagcugcaa

SEQ ID NO: 5610 - RNA, 22 nt, Artificial Sequence
  C3-targeting RNA guide sequence portion
auuggaguuugggauguuucua

SEQ ID NO: 5611 - RNA, 22 nt, Artificial Sequence
  C3-targeting RNA guide sequence portion
auuggcaagugcgccggcaguc

SEQ ID NO: 5612 - RNA, 22 nt, Artificial Sequence
  C3-targeting RNA guide sequence portion
auuggcuacuucggguucaugu

SEQ ID NO: 5613 - RNA, 22 nt, Artificial Sequence
  C3-targeting RNA guide sequence portion
auuguauuuauuaggacugggg

SEQ ID NO: 5614 - RNA, 22 nt, Artificial Sequence
  C3-targeting RNA guide sequence portion
auugugggucuggaaguccaga

SEQ ID NO: 5615 - RNA, 22 nt, Artificial Sequence
  C3-targeting RNA guide sequence portion
auuuauuaggacugggguguug

SEQ ID NO: 5616 - RNA, 22 nt, Artificial Sequence
  C3-targeting RNA guide sequence portion
auuugagguuuagagguuuugg

SEQ ID NO: 5617 - RNA, 22 nt, Artificial Sequence
  C3-targeting RNA guide sequence portion
auuuggaguguuuagagaggua

SEQ ID NO: 5618 - RNA, 22 nt, Artificial Sequence
  C3-targeting RNA guide sequence portion
auuugggaguuugcagcuuggg

SEQ ID NO: 5619 - RNA, 22 nt, Artificial Sequence
  C3-targeting RNA guide sequence portion
auuugggcugccugagaguuug

SEQ ID NO: 5620 - RNA, 22 nt, Artificial Sequence
  C3-targeting RNA guide sequence portion
auuuggggguccaggucccugu

SEQ ID NO: 5621 - RNA, 22 nt, Artificial Sequence
  C3-targeting RNA guide sequence portion
auuuggguguuuguggauucag

SEQ ID NO: 5622 - RNA, 22 nt, Artificial Sequence
  C3-targeting RNA guide sequence portion
auuuucaguguggguuuaaaga

SEQ ID NO: 5623 - RNA, 22 nt, Artificial Sequence
  C3-targeting RNA guide sequence portion
caaaaccucuaaaccucaaauc

SEQ ID NO: 5624 - RNA, 22 nt, Artificial Sequence
  C3-targeting RNA guide sequence portion
caaacacccaaaugcacccuga

SEQ ID NO: 5625 - RNA, 22 nt, Artificial Sequence
  C3-targeting RNA guide sequence portion
caaacacccaacccauaaacac

SEQ ID NO: 5626 - RNA, 22 nt, Artificial Sequence
  C3-targeting RNA guide sequence portion
caaacagggcugguucuggggu

SEQ ID NO: 5627 - RNA, 22 nt, Artificial Sequence
  C3-targeting RNA guide sequence portion
caaacccacauacgccaaaacc

SEQ ID NO: 5628 - RNA, 22 nt, Artificial Sequence
  C3-targeting RNA guide sequence portion
caaacccagccuaaaccuccaa

SEQ ID NO: 5629 - RNA, 22 nt, Artificial Sequence
  C3-targeting RNA guide sequence portion
caaacccuaaaccucuaccucu

SEQ ID NO: 5630 - RNA, 22 nt, Artificial Sequence
  C3-targeting RNA guide sequence portion
caaacccugaaccuuccaacca

SEQ ID NO: 5631 - RNA, 22 nt, Artificial Sequence
  C3-targeting RNA guide sequence portion
caaacucacaggcagcccaaau

SEQ ID NO: 5632 - RNA, 22 nt, Artificial Sequence
  C3-targeting RNA guide sequence portion
caaacuccaauuccaccauacc

SEQ ID NO: 5633 - RNA, 22 nt, Artificial Sequence
  C3-targeting RNA guide sequence portion
caaacucccaaaucuuguaaag

SEQ ID NO: 5634 - RNA, 22 nt, Artificial Sequence
  C3-targeting RNA guide sequence portion
caaacucccggacacccucaac

SEQ ID NO: 5635 - RNA, 22 nt, Artificial Sequence
  C3-targeting RNA guide sequence portion
caaacucucaggcagcccaaau

SEQ ID NO: 5636 - RNA, 22 nt, Artificial Sequence
  C3-targeting RNA guide sequence portion
caaaggccaggcccagcuggcu

SEQ ID NO: 5637 - RNA, 22 nt, Artificial Sequence
  C3-targeting RNA guide sequence portion
caaauauauauaaucauuccca

SEQ ID NO: 5638 - RNA, 22 nt, Artificial Sequence
  C3-targeting RNA guide sequence portion
caaauauguaaacacucaaacu

SEQ ID NO: 5639 - RNA, 22 nt, Artificial Sequence
  C3-targeting RNA guide sequence portion
caaaucuuagagcaccccaaac

SEQ ID NO: 5640 - RNA, 22 nt, Artificial Sequence
  C3-targeting RNA guide sequence portion
caaaucuuguaaaguccaaacc

SEQ ID NO: 5641 - RNA, 22 nt, Artificial Sequence
  C3-targeting RNA guide sequence portion
caaaugcacccugaauucuaca

SEQ ID NO: 5642 - RNA, 22 nt, Artificial Sequence
  C3-targeting RNA guide sequence portion
caaaugccccaacuauacauga

SEQ ID NO: 5643 - RNA, 22 nt, Artificial Sequence
  C3-targeting RNA guide sequence portion
caaauguauauaaacuccaauu

SEQ ID NO: 5644 - RNA, 22 nt, Artificial Sequence
  C3-targeting RNA guide sequence portion
caaaugucugcuuccaccccag

SEQ ID NO: 5645 - RNA, 22 nt, Artificial Sequence
  C3-targeting RNA guide sequence portion
caacaccccaguccuaauaaau

SEQ ID NO: 5646 - RNA, 22 nt, Artificial Sequence
  C3-targeting RNA guide sequence portion
caacagaugaccucaauucuag

SEQ ID NO: 5647 - RNA, 22 nt, Artificial Sequence
  C3-targeting RNA guide sequence portion
caaccacaugggcaggacagca

SEQ ID NO: 5648 - RNA, 22 nt, Artificial Sequence
  C3-targeting RNA guide sequence portion
caaccagcgucagcaacuccuc

SEQ ID NO: 5649 - RNA, 22 nt, Artificial Sequence
  C3-targeting RNA guide sequence portion
caacccauaaacacccaaacuc

SEQ ID NO: 5650 - RNA, 22 nt, Artificial Sequence
  C3-targeting RNA guide sequence portion
caaccgcaccaucaaugaacac

SEQ ID NO: 5651 - RNA, 22 nt, Artificial Sequence
  C3-targeting RNA guide sequence portion
caaccugcuaaccccugaaucc

SEQ ID NO: 5652 - RNA, 22 nt, Artificial Sequence
  C3-targeting RNA guide sequence portion
caacgagggggccacacauccc

SEQ ID NO: 5653 - RNA, 22 nt, Artificial Sequence
  C3-targeting RNA guide sequence portion
caacuauacaugaacccgaagu

SEQ ID NO: 5654 - RNA, 22 nt, Artificial Sequence
  C3-targeting RNA guide sequence portion
caacuccuccaagucucuggac

SEQ ID NO: 5655 - RNA, 22 nt, Artificial Sequence
  C3-targeting RNA guide sequence portion
caacucuaccuacccaaaccca

SEQ ID NO: 5656 - RNA, 22 nt, Artificial Sequence
  C3-targeting RNA guide sequence portion
caagauuugggaguuugcagcu

SEQ ID NO: 5657 - RNA, 22 nt, Artificial Sequence
  C3-targeting RNA guide sequence portion
caagcccacucccgugccccac

SEQ ID NO: 5658 - RNA, 22 nt, Artificial Sequence
  C3-targeting RNA guide sequence portion
caagcugcaaacucccaaaucu

SEQ ID NO: 5659 - RNA, 22 nt, Artificial Sequence
  C3-targeting RNA guide sequence portion
caaguccccaagcugcaaacuc

SEQ ID NO: 5660 - RNA, 22 nt, Artificial Sequence
  C3-targeting RNA guide sequence portion
caagucucuggacuuccagacc

SEQ ID NO: 5661 - RNA, 22 nt, Artificial Sequence
  C3-targeting RNA guide sequence portion
caagugcgccggcagucacugg

SEQ ID NO: 5662 - RNA, 22 nt, Artificial Sequence
  C3-targeting RNA guide sequence portion
caaucaauuccaaaugccccaa

SEQ ID NO: 5663 - RNA, 22 nt, Artificial Sequence
  C3-targeting RNA guide sequence portion
caaucgccuaaacccacacaug

SEQ ID NO: 5664 - RNA, 22 nt, Artificial Sequence
  C3-targeting RNA guide sequence portion
caaucuuuaaacccacacugaa

SEQ ID NO: 5665 - RNA, 22 nt, Artificial Sequence
  C3-targeting RNA guide sequence portion
caaugaacaccacauacacccu

SEQ ID NO: 5666 - RNA, 22 nt, Artificial Sequence
  C3-targeting RNA guide sequence portion
caaugccauuaucuucucuggg

SEQ ID NO: 5667 - RNA, 22 nt, Artificial Sequence
  C3-targeting RNA guide sequence portion
caauuccaaaugccccaacuau

SEQ ID NO: 5668 - RNA, 22 nt, Artificial Sequence
  C3-targeting RNA guide sequence portion
caauuccaccauaccuggauuc

SEQ ID NO: 5669 - RNA, 22 nt, Artificial Sequence
  C3-targeting RNA guide sequence portion
caauuccacgauaccuggauuc

SEQ ID NO: 5670 - RNA, 22 nt, Artificial Sequence
  C3-targeting RNA guide sequence portion
caauuccaugauaccuggauuc

SEQ ID NO: 5671 - RNA, 22 nt, Artificial Sequence
  C3-targeting RNA guide sequence portion
caauucuagaaacaucccaaac

SEQ ID NO: 5672 - RNA, 22 nt, Artificial Sequence
  C3-targeting RNA guide sequence portion
caauuuucaguguggguuuaaa

SEQ ID NO: 5673 - RNA, 22 nt, Artificial Sequence
  C3-targeting RNA guide sequence portion
cacaaacacccaaaugcacccu

SEQ ID NO: 5674 - RNA, 22 nt, Artificial Sequence
  C3-targeting RNA guide sequence portion
cacaaacacccaacccauaaac

SEQ ID NO: 5675 - RNA, 22 nt, Artificial Sequence
  C3-targeting RNA guide sequence portion
cacaaacagggcugguucuggg

SEQ ID NO: 5676 - RNA, 22 nt, Artificial Sequence
  C3-targeting RNA guide sequence portion
cacaaucgccuaaacccacaca

SEQ ID NO: 5677 - RNA, 22 nt, Artificial Sequence
  C3-targeting RNA guide sequence portion
cacacagccugccaggcgcuga

SEQ ID NO: 5678 - RNA, 22 nt, Artificial Sequence
  C3-targeting RNA guide sequence portion
cacacaucccaccaaacccuga

SEQ ID NO: 5679 - RNA, 22 nt, Artificial Sequence
  C3-targeting RNA guide sequence portion
cacacaugccccaaacccuaaa

SEQ ID NO: 5680 - RNA, 22 nt, Artificial Sequence
  C3-targeting RNA guide sequence portion
cacacugaaaauugcaaguccc

SEQ ID NO: 5681 - RNA, 22 nt, Artificial Sequence
  C3-targeting RNA guide sequence portion
cacagccugccaggcgcugacu

SEQ ID NO: 5682 - RNA, 22 nt, Artificial Sequence
  C3-targeting RNA guide sequence portion
cacaggcagcccaaauauauau

SEQ ID NO: 5683 - RNA, 22 nt, Artificial Sequence
  C3-targeting RNA guide sequence portion
cacaggcagcccaaauguauau

SEQ ID NO: 5684 - RNA, 22 nt, Artificial Sequence
  C3-targeting RNA guide sequence portion
cacauacacccuaaaccaacag

SEQ ID NO: 5685 - RNA, 22 nt, Artificial Sequence
  C3-targeting RNA guide sequence portion
cacauacgccaaaaccucuaaa

SEQ ID NO: 5686 - RNA, 22 nt, Artificial Sequence
  C3-targeting RNA guide sequence portion
cacaucccaccaaacccugaac

SEQ ID NO: 5687 - RNA, 22 nt, Artificial Sequence
  C3-targeting RNA guide sequence portion
cacauccguggaaugacaagcc

SEQ ID NO: 5688 - RNA, 22 nt, Artificial Sequence
  C3-targeting RNA guide sequence portion
cacaugccccaaacccuaaacc

SEQ ID NO: 5689 - RNA, 22 nt, Artificial Sequence
  C3-targeting RNA guide sequence portion
cacaugggcaggacagcagcca

SEQ ID NO: 5690 - RNA, 22 nt, Artificial Sequence
  C3-targeting RNA guide sequence portion
caccaaacccugaaccuuccaa

SEQ ID NO: 5691 - RNA, 22 nt, Artificial Sequence
  C3-targeting RNA guide sequence portion
caccacauacacccuaaaccaa

SEQ ID NO: 5692 - RNA, 22 nt, Artificial Sequence
  C3-targeting RNA guide sequence portion
caccauaccuggauuccacaaa

SEQ ID NO: 5693 - RNA, 22 nt, Artificial Sequence
  C3-targeting RNA guide sequence portion
caccaucaaugaacaccacaua

SEQ ID NO: 5694 - RNA, 22 nt, Artificial Sequence
  C3-targeting RNA guide sequence portion
caccaugacucccacucucagc

SEQ ID NO: 5695 - RNA, 22 nt, Artificial Sequence
  C3-targeting RNA guide sequence portion
cacccaaacucacaggcagccc

SEQ ID NO: 5696 - RNA, 22 nt, Artificial Sequence
  C3-targeting RNA guide sequence portion
cacccaaacucucaggcagccc

SEQ ID NO: 5697 - RNA, 22 nt, Artificial Sequence
  C3-targeting RNA guide sequence portion
cacccaaaugcacccugaauuc

SEQ ID NO: 5698 - RNA, 22 nt, Artificial Sequence
  C3-targeting RNA guide sequence portion
cacccaacccauaaacacccaa

SEQ ID NO: 5699 - RNA, 22 nt, Artificial Sequence
  C3-targeting RNA guide sequence portion
caccccaaacccagccuaaacc

SEQ ID NO: 5700 - RNA, 22 nt, Artificial Sequence
  C3-targeting RNA guide sequence portion
caccccagaaccagcccuguuu

SEQ ID NO: 5701 - RNA, 22 nt, Artificial Sequence
  C3-targeting RNA guide sequence portion
caccccaguccuaauaaauaca

SEQ ID NO: 5702 - RNA, 22 nt, Artificial Sequence
  C3-targeting RNA guide sequence portion
cacccuaaaccaacagaugacc

SEQ ID NO: 5703 - RNA, 22 nt, Artificial Sequence
  C3-targeting RNA guide sequence portion
cacccucaacucuaccuaccca

SEQ ID NO: 5704 - RNA, 22 nt, Artificial Sequence
  C3-targeting RNA guide sequence portion
cacccugaauucuacagggacc

SEQ ID NO: 5705 - RNA, 22 nt, Artificial Sequence
  C3-targeting RNA guide sequence portion
caccgucucaaccacaugggca

SEQ ID NO: 5706 - RNA, 22 nt, Artificial Sequence
  C3-targeting RNA guide sequence portion
cacgauaccuggauuccacaaa

SEQ ID NO: 5707 - RNA, 22 nt, Artificial Sequence
  C3-targeting RNA guide sequence portion
cacggaugugagacgccagucc

SEQ ID NO: 5708 - RNA, 22 nt, Artificial Sequence
  C3-targeting RNA guide sequence portion
cacgggagugggcuugucauuc

SEQ ID NO: 5709 - RNA, 22 nt, Artificial Sequence
  C3-targeting RNA guide sequence portion
cacucaaacucccggacacccu

SEQ ID NO: 5710 - RNA, 22 nt, Artificial Sequence
  C3-targeting RNA guide sequence portion
cacuccaaauauguaaacacuc

SEQ ID NO: 5711 - RNA, 22 nt, Artificial Sequence
  C3-targeting RNA guide sequence portion
cacucucagccagcugggccug

SEQ ID NO: 5712 - RNA, 22 nt, Artificial Sequence
  C3-targeting RNA guide sequence portion
cacugaaaauugcaagucccca

SEQ ID NO: 5713 - RNA, 22 nt, Artificial Sequence
  C3-targeting RNA guide sequence portion
cacugccaccgucucaaccaca

SEQ ID NO: 5714 - RNA, 22 nt, Artificial Sequence
  C3-targeting RNA guide sequence portion
cacuggagucagcgccuggcag

SEQ ID NO: 5715 - RNA, 22 nt, Artificial Sequence
  C3-targeting RNA guide sequence portion
cacuggauccucuccaggacca

SEQ ID NO: 5716 - RNA, 22 nt, Artificial Sequence
  C3-targeting RNA guide sequence portion
cacuugccaaugccauuaucuu

SEQ ID NO: 5717 - RNA, 22 nt, Artificial Sequence
  C3-targeting RNA guide sequence portion
cagaaccagcccuguuuguggg

SEQ ID NO: 5718 - RNA, 22 nt, Artificial Sequence
  C3-targeting RNA guide sequence portion
cagacauuuggggguccagguc

SEQ ID NO: 5719 - RNA, 22 nt, Artificial Sequence
  C3-targeting RNA guide sequence portion
cagacccacaaucgccuaaacc

SEQ ID NO: 5720 - RNA, 22 nt, Artificial Sequence
  C3-targeting RNA guide sequence portion
cagagaagauaauggcauuggc

SEQ ID NO: 5721 - RNA, 22 nt, Artificial Sequence
  C3-targeting RNA guide sequence portion
cagagacuuggaggaguugcug

SEQ ID NO: 5722 - RNA, 22 nt, Artificial Sequence
  C3-targeting RNA guide sequence portion
cagaggcuggggcacacagccu

SEQ ID NO: 5723 - RNA, 22 nt, Artificial Sequence
  C3-targeting RNA guide sequence portion
cagaugaccucaauucuagaaa

SEQ ID NO: 5724 - RNA, 22 nt, Artificial Sequence
  C3-targeting RNA guide sequence portion
cagcaacuccuccaagucucug

SEQ ID NO: 5725 - RNA, 22 nt, Artificial Sequence
  C3-targeting RNA guide sequence portion
cagcagccaccaugacucccac

SEQ ID NO: 5726 - RNA, 22 nt, Artificial Sequence
  C3-targeting RNA guide sequence portion
cagccaccaugacucccacucu

SEQ ID NO: 5727 - RNA, 22 nt, Artificial Sequence
  C3-targeting RNA guide sequence portion
cagccagcugggccuggccuuu

SEQ ID NO: 5728 - RNA, 22 nt, Artificial Sequence
  C3-targeting RNA guide sequence portion
cagcccaaauauauauaaucau

SEQ ID NO: 5729 - RNA, 22 nt, Artificial Sequence
  C3-targeting RNA guide sequence portion
cagcccuguuuguggguagagu

SEQ ID NO: 5730 - RNA, 22 nt, Artificial Sequence
  C3-targeting RNA guide sequence portion
cagccuaaaccuccaacacccc

SEQ ID NO: 5731 - RNA, 22 nt, Artificial Sequence
  C3-targeting RNA guide sequence portion
cagccucugguccuggagagga

SEQ ID NO: 5732 - RNA, 22 nt, Artificial Sequence
  C3-targeting RNA guide sequence portion
cagccugccaggcgcugacucc

SEQ ID NO: 5733 - RNA, 22 nt, Artificial Sequence
  C3-targeting RNA guide sequence portion
cagcgccuggcaggcugugugc

SEQ ID NO: 5734 - RNA, 22 nt, Artificial Sequence
  C3-targeting RNA guide sequence portion
cagcgucagcaacuccuccaag

SEQ ID NO: 5735 - RNA, 22 nt, Artificial Sequence
  C3-targeting RNA guide sequence portion
cagcuggcugagagugggaguc

SEQ ID NO: 5736 - RNA, 22 nt, Artificial Sequence
  C3-targeting RNA guide sequence portion
cagcugggccuggccuuugaaa

SEQ ID NO: 5737 - RNA, 22 nt, Artificial Sequence
  C3-targeting RNA guide sequence portion
cagcuuggggacuugcaauuuu

SEQ ID NO: 5738 - RNA, 22 nt, Artificial Sequence
  C3-targeting RNA guide sequence portion
caggacagcagccaccaugacu

SEQ ID NO: 5739 - RNA, 22 nt, Artificial Sequence
  C3-targeting RNA guide sequence portion
caggaccagaggcuggggcaca

SEQ ID NO: 5740 - RNA, 22 nt, Artificial Sequence
  C3-targeting RNA guide sequence portion
caggcagcccaaauauauauaa

SEQ ID NO: 5741 - RNA, 22 nt, Artificial Sequence
  C3-targeting RNA guide sequence portion
caggcccagcuggcugagagug

SEQ ID NO: 5742 - RNA, 22 nt, Artificial Sequence
  C3-targeting RNA guide sequence portion
caggcgcugacuccagugagga

SEQ ID NO: 5743 - RNA, 22 nt, Artificial Sequence
  C3-targeting RNA guide sequence portion
caggcugugugccccagccucu

SEQ ID NO: 5744 - RNA, 22 nt, Artificial Sequence
  C3-targeting RNA guide sequence portion
caggcuuucaaaggccaggccc

SEQ ID NO: 5745 - RNA, 22 nt, Artificial Sequence
  C3-targeting RNA guide sequence portion
cagggaccuggacccccaaaug

SEQ ID NO: 5746 - RNA, 22 nt, Artificial Sequence
  C3-targeting RNA guide sequence portion
cagggcugguucugggguggaa

SEQ ID NO: 5747 - RNA, 22 nt, Artificial Sequence
  C3-targeting RNA guide sequence portion
cagggguuagcagguugggaau

SEQ ID NO: 5748 - RNA, 22 nt, Artificial Sequence
  C3-targeting RNA guide sequence portion
cagggugcauuuggguguuugu

SEQ ID NO: 5749 - RNA, 22 nt, Artificial Sequence
  C3-targeting RNA guide sequence portion
caggguuuggugggaugugugg

SEQ ID NO: 5750 - RNA, 22 nt, Artificial Sequence
  C3-targeting RNA guide sequence portion
cagguaucauggaauuggaguu

SEQ ID NO: 5751 - RNA, 22 nt, Artificial Sequence
  C3-targeting RNA guide sequence portion
cagguaucguggaauuggaguu

SEQ ID NO: 5752 - RNA, 22 nt, Artificial Sequence
  C3-targeting RNA guide sequence portion
cagguaugguggaauuggaguu

SEQ ID NO: 5753 - RNA, 22 nt, Artificial Sequence
  C3-targeting RNA guide sequence portion
caggucccuguagaauucaggg

SEQ ID NO: 5754 - RNA, 22 nt, Artificial Sequence
  C3-targeting RNA guide sequence portion
cagguugggaaugauuauauau

SEQ ID NO: 5755 - RNA, 22 nt, Artificial Sequence
  C3-targeting RNA guide sequence portion
cagucacuggauccucuccagg

SEQ ID NO: 5756 - RNA, 22 nt, Artificial Sequence
  C3-targeting RNA guide sequence portion
caguccucacuggagucagcgc

SEQ ID NO: 5757 - RNA, 22 nt, Artificial Sequence
  C3-targeting RNA guide sequence portion
cagugacugccggcgcacuugc

SEQ ID NO: 5758 - RNA, 22 nt, Artificial Sequence
  C3-targeting RNA guide sequence portion
cagugaggacuggcgucucaca

SEQ ID NO: 5759 - RNA, 22 nt, Artificial Sequence
  C3-targeting RNA guide sequence portion
cagugcccagagaagauaaugg

SEQ ID NO: 5760 - RNA, 22 nt, Artificial Sequence
  C3-targeting RNA guide sequence portion
caguguggguuuaaagauuggc

SEQ ID NO: 5761 - RNA, 22 nt, Artificial Sequence
  C3-targeting RNA guide sequence portion
cauaaacacccaaacucucagg

SEQ ID NO: 5762 - RNA, 22 nt, Artificial Sequence
  C3-targeting RNA guide sequence portion
cauacacccuaaaccaacagau

SEQ ID NO: 5763 - RNA, 22 nt, Artificial Sequence
  C3-targeting RNA guide sequence portion
cauaccuggauuccacaaacac

SEQ ID NO: 5764 - RNA, 22 nt, Artificial Sequence
  C3-targeting RNA guide sequence portion
cauacgccaaaaccucuaaacc

SEQ ID NO: 5765 - RNA, 22 nt, Artificial Sequence
  C3-targeting RNA guide sequence portion
cauauuuggaguguuuagagag

SEQ ID NO: 5766 - RNA, 22 nt, Artificial Sequence
  C3-targeting RNA guide sequence portion
caucaaugaacaccacauacac

SEQ ID NO: 5767 - RNA, 22 nt, Artificial Sequence
  C3-targeting RNA guide sequence portion
caucccaaacuccaauuccacc

SEQ ID NO: 5768 - RNA, 22 nt, Artificial Sequence
  C3-targeting RNA guide sequence portion
caucccaccaaacccugaaccu

SEQ ID NO: 5769 - RNA, 22 nt, Artificial Sequence
  C3-targeting RNA guide sequence portion
cauccguggaaugacaagccca

SEQ ID NO: 5770 - RNA, 22 nt, Artificial Sequence
  C3-targeting RNA guide sequence portion
caucuguugguuuaggguguau

SEQ ID NO: 5771 - RNA, 22 nt, Artificial Sequence
  C3-targeting RNA guide sequence portion
caugaacccgaaguagccaauc

SEQ ID NO: 5772 - RNA, 22 nt, Artificial Sequence
  C3-targeting RNA guide sequence portion
caugacucccacucucagccag

SEQ ID NO: 5773 - RNA, 22 nt, Artificial Sequence
  C3-targeting RNA guide sequence portion
caugauaccuggauuccacaaa

SEQ ID NO: 5774 - RNA, 22 nt, Artificial Sequence
  C3-targeting RNA guide sequence portion
caugccccaaacccuaaaccuc

SEQ ID NO: 5775 - RNA, 22 nt, Artificial Sequence
  C3-targeting RNA guide sequence portion
cauggaauuggaguuuauauac

SEQ ID NO: 5776 - RNA, 22 nt, Artificial Sequence
  C3-targeting RNA guide sequence portion
caugggcaggacagcagccacc

SEQ ID NO: 5777 - RNA, 22 nt, Artificial Sequence
  C3-targeting RNA guide sequence portion
caugguggcugcuguccugccc

SEQ ID NO: 5778 - RNA, 22 nt, Artificial Sequence
  C3-targeting RNA guide sequence portion
cauguauaguuggggcauuugg

SEQ ID NO: 5779 - RNA, 22 nt, Artificial Sequence
  C3-targeting RNA guide sequence portion
caugugguugagacgguggcag

SEQ ID NO: 5780 - RNA, 22 nt, Artificial Sequence
  C3-targeting RNA guide sequence portion
cauguguggguuuaggcgauug

SEQ ID NO: 5781 - RNA, 22 nt, Artificial Sequence
  C3-targeting RNA guide sequence portion
cauuaucuucucugggcacugc

SEQ ID NO: 5782 - RNA, 22 nt, Artificial Sequence
  C3-targeting RNA guide sequence portion
cauuccacggaugugagacgcc

SEQ ID NO: 5783 - RNA, 22 nt, Artificial Sequence
  C3-targeting RNA guide sequence portion
cauucccaaccugcuaaccccu

SEQ ID NO: 5784 - RNA, 22 nt, Artificial Sequence
  C3-targeting RNA guide sequence portion
cauuggcaagugcgccggcagu

SEQ ID NO: 5785 - RNA, 22 nt, Artificial Sequence
  C3-targeting RNA guide sequence portion
cauuugggcugccugagaguuu

SEQ ID NO: 5786 - RNA, 22 nt, Artificial Sequence
  C3-targeting RNA guide sequence portion
cauuugggcugccugugaguuu

SEQ ID NO: 5787 - RNA, 22 nt, Artificial Sequence
  C3-targeting RNA guide sequence portion
cauuuggggguccaggucccug

SEQ ID NO: 5788 - RNA, 22 nt, Artificial Sequence
  C3-targeting RNA guide sequence portion
cauuuggguguuuguggauuca

SEQ ID NO: 5789 - RNA, 22 nt, Artificial Sequence
  C3-targeting RNA guide sequence portion
ccaaaaccucuaaaccucaaau

SEQ ID NO: 5790 - RNA, 22 nt, Artificial Sequence
  C3-targeting RNA guide sequence portion
ccaaacccacauacgccaaaac

SEQ ID NO: 5791 - RNA, 22 nt, Artificial Sequence
  C3-targeting RNA guide sequence portion
ccaaacccagccuaaaccucca

SEQ ID NO: 5792 - RNA, 22 nt, Artificial Sequence
  C3-targeting RNA guide sequence portion
ccaaacccuaaaccucuaccuc

SEQ ID NO: 5793 - RNA, 22 nt, Artificial Sequence
  C3-targeting RNA guide sequence portion
ccaaacccugaaccuuccaacc

SEQ ID NO: 5794 - RNA, 22 nt, Artificial Sequence
  C3-targeting RNA guide sequence portion
ccaaacucacaggcagcccaaa

SEQ ID NO: 5795 - RNA, 22 nt, Artificial Sequence
  C3-targeting RNA guide sequence portion
ccaaacuccaauuccaccauac

SEQ ID NO: 5796 - RNA, 22 nt, Artificial Sequence
  C3-targeting RNA guide sequence portion
ccaaacucucaggcagcccaaa

SEQ ID NO: 5797 - RNA, 22 nt, Artificial Sequence
  C3-targeting RNA guide sequence portion
ccaaauauauauaaucauuccc

SEQ ID NO: 5798 - RNA, 22 nt, Artificial Sequence
  C3-targeting RNA guide sequence portion
ccaaauauguaaacacucaaac

SEQ ID NO: 5799 - RNA, 22 nt, Artificial Sequence
  C3-targeting RNA guide sequence portion
ccaaaucuuguaaaguccaaac

SEQ ID NO: 5800 - RNA, 22 nt, Artificial Sequence
  C3-targeting RNA guide sequence portion
ccaaaugcacccugaauucuac

SEQ ID NO: 5801 - RNA, 22 nt, Artificial Sequence
  C3-targeting RNA guide sequence portion
ccaaaugccccaacuauacaug

SEQ ID NO: 5802 - RNA, 22 nt, Artificial Sequence
  C3-targeting RNA guide sequence portion
ccaaauguauauaaacuccaau

SEQ ID NO: 5803 - RNA, 22 nt, Artificial Sequence
  C3-targeting RNA guide sequence portion
ccaaaugucugcuuccacccca

SEQ ID NO: 5804 - RNA, 22 nt, Artificial Sequence
  C3-targeting RNA guide sequence portion
ccaacaccccaguccuaauaaa

SEQ ID NO: 5805 - RNA, 22 nt, Artificial Sequence
  C3-targeting RNA guide sequence portion
ccaacagaugaccucaauucua

SEQ ID NO: 5806 - RNA, 22 nt, Artificial Sequence
  C3-targeting RNA guide sequence portion
ccaaccagcgucagcaacuccu

SEQ ID NO: 5807 - RNA, 22 nt, Artificial Sequence
  C3-targeting RNA guide sequence portion
ccaacccauaaacacccaaacu

SEQ ID NO: 5808 - RNA, 22 nt, Artificial Sequence
  C3-targeting RNA guide sequence portion
ccaaccgcaccaucaaugaaca

SEQ ID NO: 5809 - RNA, 22 nt, Artificial Sequence
  C3-targeting RNA guide sequence portion
ccaaccugcuaaccccugaauc

SEQ ID NO: 5810 - RNA, 22 nt, Artificial Sequence
  C3-targeting RNA guide sequence portion
ccaacuauacaugaacccgaag

SEQ ID NO: 5811 - RNA, 22 nt, Artificial Sequence
  C3-targeting RNA guide sequence portion
ccaagcugcaaacucccaaauc

SEQ ID NO: 5812 - RNA, 22 nt, Artificial Sequence
  C3-targeting RNA guide sequence portion
ccaagucucuggacuuccagac

SEQ ID NO: 5813 - RNA, 22 nt, Artificial Sequence
  C3-targeting RNA guide sequence portion
ccaaucuuuaaacccacacuga

SEQ ID NO: 5814 - RNA, 22 nt, Artificial Sequence
  C3-targeting RNA guide sequence portion
ccaaugccauuaucuucucugg

SEQ ID NO: 5815 - RNA, 22 nt, Artificial Sequence
  C3-targeting RNA guide sequence portion
ccaauuccaccauaccuggauu

SEQ ID NO: 5816 - RNA, 22 nt, Artificial Sequence
  C3-targeting RNA guide sequence portion
ccaauuccacgauaccuggauu

SEQ ID NO: 5817 - RNA, 22 nt, Artificial Sequence
  C3-targeting RNA guide sequence portion
ccaauuccaugauaccuggauu

SEQ ID NO: 5818 - RNA, 22 nt, Artificial Sequence
  C3-targeting RNA guide sequence portion
ccacaaacacccaaaugcaccc

SEQ ID NO: 5819 - RNA, 22 nt, Artificial Sequence
  C3-targeting RNA guide sequence portion
ccacaaacacccaacccauaaa

SEQ ID NO: 5820 - RNA, 22 nt, Artificial Sequence
  C3-targeting RNA guide sequence portion
ccacaaacagggcugguucugg

SEQ ID NO: 5821 - RNA, 22 nt, Artificial Sequence
  C3-targeting RNA guide sequence portion
ccacaaucgccuaaacccacac

SEQ ID NO: 5822 - RNA, 22 nt, Artificial Sequence
  C3-targeting RNA guide sequence portion
ccacacaucccaccaaacccug

SEQ ID NO: 5823 - RNA, 22 nt, Artificial Sequence
  C3-targeting RNA guide sequence portion
ccacacaugccccaaacccuaa

SEQ ID NO: 5824 - RNA, 22 nt, Artificial Sequence
  C3-targeting RNA guide sequence portion
ccacacugaaaauugcaagucc

SEQ ID NO: 5825 - RNA, 22 nt, Artificial Sequence
  C3-targeting RNA guide sequence portion
ccacauacacccuaaaccaaca

SEQ ID NO: 5826 - RNA, 22 nt, Artificial Sequence
  C3-targeting RNA guide sequence portion
ccacauacgccaaaaccucuaa

SEQ ID NO: 5827 - RNA, 22 nt, Artificial Sequence
  C3-targeting RNA guide sequence portion
ccacaugggcaggacagcagcc

SEQ ID NO: 5828 - RNA, 22 nt, Artificial Sequence
  C3-targeting RNA guide sequence portion
ccaccaaacccugaaccuucca

SEQ ID NO: 5829 - RNA, 22 nt, Artificial Sequence
  C3-targeting RNA guide sequence portion
ccaccauaccuggauuccacaa

SEQ ID NO: 5830 - RNA, 22 nt, Artificial Sequence
  C3-targeting RNA guide sequence portion
ccaccaugacucccacucucag

SEQ ID NO: 5831 - RNA, 22 nt, Artificial Sequence
  C3-targeting RNA guide sequence portion
ccaccccagaaccagcccuguu

SEQ ID NO: 5832 - RNA, 22 nt, Artificial Sequence
  C3-targeting RNA guide sequence portion
ccaccgucucaaccacaugggc

SEQ ID NO: 5833 - RNA, 22 nt, Artificial Sequence
  C3-targeting RNA guide sequence portion
ccacgauaccuggauuccacaa

SEQ ID NO: 5834 - RNA, 22 nt, Artificial Sequence
  C3-targeting RNA guide sequence portion
ccacggaugugagacgccaguc

SEQ ID NO: 5835 - RNA, 22 nt, Artificial Sequence
  C3-targeting RNA guide sequence portion
ccacucucagccagcugggccu

SEQ ID NO: 5836 - RNA, 22 nt, Artificial Sequence
  C3-targeting RNA guide sequence portion
ccagaaccagcccuguuugugg

SEQ ID NO: 5837 - RNA, 22 nt, Artificial Sequence
  C3-targeting RNA guide sequence portion
ccagacccacaaucgccuaaac

SEQ ID NO: 5838 - RNA, 22 nt, Artificial Sequence
  C3-targeting RNA guide sequence portion
ccagagaagauaauggcauugg

SEQ ID NO: 5839 - RNA, 22 nt, Artificial Sequence
  C3-targeting RNA guide sequence portion
ccagagacuuggaggaguugcu

SEQ ID NO: 5840 - RNA, 22 nt, Artificial Sequence
  C3-targeting RNA guide sequence portion
ccagaggcuggggcacacagcc

SEQ ID NO: 5841 - RNA, 22 nt, Artificial Sequence
  C3-targeting RNA guide sequence portion
ccagcccuguuuguggguagag

SEQ ID NO: 5842 - RNA, 22 nt, Artificial Sequence
  C3-targeting RNA guide sequence portion
ccagccuaaaccuccaacaccc

SEQ ID NO: 5843 - RNA, 22 nt, Artificial Sequence
  C3-targeting RNA guide sequence portion
ccagccucugguccuggagagg

SEQ ID NO: 5844 - RNA, 22 nt, Artificial Sequence
  C3-targeting RNA guide sequence portion
ccagcgucagcaacuccuccaa

SEQ ID NO: 5845 - RNA, 22 nt, Artificial Sequence
  C3-targeting RNA guide sequence portion
ccagcuggcugagagugggagu

SEQ ID NO: 5846 - RNA, 22 nt, Artificial Sequence
  C3-targeting RNA guide sequence portion
ccagcugggccuggccuuugaa

SEQ ID NO: 5847 - RNA, 22 nt, Artificial Sequence
  C3-targeting RNA guide sequence portion
ccaggaccagaggcuggggcac

SEQ ID NO: 5848 - RNA, 22 nt, Artificial Sequence
  C3-targeting RNA guide sequence portion
ccaggcccagcuggcugagagu

SEQ ID NO: 5849 - RNA, 22 nt, Artificial Sequence
  C3-targeting RNA guide sequence portion
ccaggcgcugacuccagugagg

SEQ ID NO: 5850 - RNA, 22 nt, Artificial Sequence
  C3-targeting RNA guide sequence portion
ccaggcuuucaaaggccaggcc

SEQ ID NO: 5851 - RNA, 22 nt, Artificial Sequence
  C3-targeting RNA guide sequence portion
ccagguaucauggaauuggagu

SEQ ID NO: 5852 - RNA, 22 nt, Artificial Sequence
  C3-targeting RNA guide sequence portion
ccagguaucguggaauuggagu

SEQ ID NO: 5853 - RNA, 22 nt, Artificial Sequence
  C3-targeting RNA guide sequence portion
ccagguaugguggaauuggagu

SEQ ID NO: 5854 - RNA, 22 nt, Artificial Sequence
  C3-targeting RNA guide sequence portion
ccaggucccuguagaauucagg

SEQ ID NO: 5855 - RNA, 22 nt, Artificial Sequence
  C3-targeting RNA guide sequence portion
ccaguccuaauaaauacaauca

SEQ ID NO: 5856 - RNA, 22 nt, Artificial Sequence
  C3-targeting RNA guide sequence portion
ccaguccucacuggagucagcg

SEQ ID NO: 5857 - RNA, 22 nt, Artificial Sequence
  C3-targeting RNA guide sequence portion
ccagugacugccggcgcacuug

SEQ ID NO: 5858 - RNA, 22 nt, Artificial Sequence
  C3-targeting RNA guide sequence portion
ccagugaggacuggcgucucac

SEQ ID NO: 5859 - RNA, 22 nt, Artificial Sequence
  C3-targeting RNA guide sequence portion
ccauaaacacccaaacucucag

SEQ ID NO: 5860 - RNA, 22 nt, Artificial Sequence
  C3-targeting RNA guide sequence portion
ccauaccuggauuccacaaaca

SEQ ID NO: 5861 - RNA, 22 nt, Artificial Sequence
  C3-targeting RNA guide sequence portion
ccaucaaugaacaccacauaca

SEQ ID NO: 5862 - RNA, 22 nt, Artificial Sequence
  C3-targeting RNA guide sequence portion
ccaugacucccacucucagcca

SEQ ID NO: 5863 - RNA, 22 nt, Artificial Sequence
  C3-targeting RNA guide sequence portion
ccaugauaccuggauuccacaa

SEQ ID NO: 5864 - RNA, 22 nt, Artificial Sequence
  C3-targeting RNA guide sequence portion
ccaugugguugagacgguggca

SEQ ID NO: 5865 - RNA, 22 nt, Artificial Sequence
  C3-targeting RNA guide sequence portion
ccauuaucuucucugggcacug

SEQ ID NO: 5866 - RNA, 22 nt, Artificial Sequence
  C3-targeting RNA guide sequence portion
cccaaacccacauacgccaaaa

SEQ ID NO: 5867 - RNA, 22 nt, Artificial Sequence
  C3-targeting RNA guide sequence portion
cccaaacccagccuaaaccucc

SEQ ID NO: 5868 - RNA, 22 nt, Artificial Sequence
  C3-targeting RNA guide sequence portion
cccaaacccuaaaccucuaccu

SEQ ID NO: 5869 - RNA, 22 nt, Artificial Sequence
  C3-targeting RNA guide sequence portion
cccaaacucacaggcagcccaa

SEQ ID NO: 5870 - RNA, 22 nt, Artificial Sequence
  C3-targeting RNA guide sequence portion
cccaaacuccaauuccaccaua

SEQ ID NO: 5871 - RNA, 22 nt, Artificial Sequence
  C3-targeting RNA guide sequence portion
cccaaacucucaggcagcccaa

SEQ ID NO: 5872 - RNA, 22 nt, Artificial Sequence
  C3-targeting RNA guide sequence portion
cccaaauauauauaaucauucc

SEQ ID NO: 5873 - RNA, 22 nt, Artificial Sequence
  C3-targeting RNA guide sequence portion
cccaaaucuuguaaaguccaaa

SEQ ID NO: 5874 - RNA, 22 nt, Artificial Sequence
  C3-targeting RNA guide sequence portion
cccaaaugcacccugaauucua

SEQ ID NO: 5875 - RNA, 22 nt, Artificial Sequence
  C3-targeting RNA guide sequence portion
cccaaauguauauaaacuccaa

SEQ ID NO: 5876 - RNA, 22 nt, Artificial Sequence
  C3-targeting RNA guide sequence portion
cccaaaugucugcuuccacccc

SEQ ID NO: 5877 - RNA, 22 nt, Artificial Sequence
  C3-targeting RNA guide sequence portion
cccaacccauaaacacccaaac

SEQ ID NO: 5878 - RNA, 22 nt, Artificial Sequence
  C3-targeting RNA guide sequence portion
cccaaccgcaccaucaaugaac

SEQ ID NO: 5879 - RNA, 22 nt, Artificial Sequence
  C3-targeting RNA guide sequence portion
cccaaccugcuaaccccugaau

SEQ ID NO: 5880 - RNA, 22 nt, Artificial Sequence
  C3-targeting RNA guide sequence portion
cccaacuauacaugaacccgaa

SEQ ID NO: 5881 - RNA, 22 nt, Artificial Sequence
  C3-targeting RNA guide sequence portion
cccaagcugcaaacucccaaau

SEQ ID NO: 5882 - RNA, 22 nt, Artificial Sequence
  C3-targeting RNA guide sequence portion
cccacaaacagggcugguucug

SEQ ID NO: 5883 - RNA, 22 nt, Artificial Sequence
  C3-targeting RNA guide sequence portion
cccacaaucgccuaaacccaca

SEQ ID NO: 5884 - RNA, 22 nt, Artificial Sequence
  C3-targeting RNA guide sequence portion
cccacacaugccccaaacccua

SEQ ID NO: 5885 - RNA, 22 nt, Artificial Sequence
  C3-targeting RNA guide sequence portion
cccacacugaaaauugcaaguc

SEQ ID NO: 5886 - RNA, 22 nt, Artificial Sequence
  C3-targeting RNA guide sequence portion
cccacauacgccaaaaccucua

SEQ ID NO: 5887 - RNA, 22 nt, Artificial Sequence
  C3-targeting RNA guide sequence portion
cccaccaaacccugaaccuucc

SEQ ID NO: 5888 - RNA, 22 nt, Artificial Sequence
  C3-targeting RNA guide sequence portion
cccacucucagccagcugggcc

SEQ ID NO: 5889 - RNA, 22 nt, Artificial Sequence
  C3-targeting RNA guide sequence portion
cccagaaccagcccuguuugug

SEQ ID NO: 5890 - RNA, 22 nt, Artificial Sequence
  C3-targeting RNA guide sequence portion
cccagagaagauaauggcauug

SEQ ID NO: 5891 - RNA, 22 nt, Artificial Sequence
  C3-targeting RNA guide sequence portion
cccagccuaaaccuccaacacc

SEQ ID NO: 5892 - RNA, 22 nt, Artificial Sequence
  C3-targeting RNA guide sequence portion
cccagccucugguccuggagag

SEQ ID NO: 5893 - RNA, 22 nt, Artificial Sequence
  C3-targeting RNA guide sequence portion
cccagcuggcugagagugggag

SEQ ID NO: 5894 - RNA, 22 nt, Artificial Sequence
  C3-targeting RNA guide sequence portion
cccaggcuuucaaaggccaggc

SEQ ID NO: 5895 - RNA, 22 nt, Artificial Sequence
  C3-targeting RNA guide sequence portion
cccaguccuaauaaauacaauc

SEQ ID NO: 5896 - RNA, 22 nt, Artificial Sequence
  C3-targeting RNA guide sequence portion
cccauaaacacccaaacucuca

SEQ ID NO: 5897 - RNA, 22 nt, Artificial Sequence
  C3-targeting RNA guide sequence portion
cccaugugguugagacgguggc

SEQ ID NO: 5898 - RNA, 22 nt, Artificial Sequence
  C3-targeting RNA guide sequence portion
ccccaaacccagccuaaaccuc

SEQ ID NO: 5899 - RNA, 22 nt, Artificial Sequence
  C3-targeting RNA guide sequence portion
ccccaaacccuaaaccucuacc

SEQ ID NO: 5900 - RNA, 22 nt, Artificial Sequence
  C3-targeting RNA guide sequence portion
ccccaaaugucugcuuccaccc

SEQ ID NO: 5901 - RNA, 22 nt, Artificial Sequence
  C3-targeting RNA guide sequence portion
ccccaaccgcaccaucaaugaa

SEQ ID NO: 5902 - RNA, 22 nt, Artificial Sequence
  C3-targeting RNA guide sequence portion
ccccaacuauacaugaacccga

SEQ ID NO: 5903 - RNA, 22 nt, Artificial Sequence
  C3-targeting RNA guide sequence portion
ccccaagcugcaaacucccaaa

SEQ ID NO: 5904 - RNA, 22 nt, Artificial Sequence
  C3-targeting RNA guide sequence portion
ccccagaaccagcccuguuugu

SEQ ID NO: 5905 - RNA, 22 nt, Artificial Sequence
  C3-targeting RNA guide sequence portion
ccccagccucugguccuggaga

SEQ ID NO: 5906 - RNA, 22 nt, Artificial Sequence
  C3-targeting RNA guide sequence portion
ccccaguccuaauaaauacaau

SEQ ID NO: 5907 - RNA, 22 nt, Artificial Sequence
  C3-targeting RNA guide sequence portion
cccccaaaugucugcuuccacc

SEQ ID NO: 5908 - RNA, 22 nt, Artificial Sequence
  C3-targeting RNA guide sequence portion
cccccaaccgcaccaucaauga

SEQ ID NO: 5909 - RNA, 22 nt, Artificial Sequence
  C3-targeting RNA guide sequence portion
cccccucguugcccaggcuuuc

SEQ ID NO: 5910 - RNA, 22 nt, Artificial Sequence
  C3-targeting RNA guide sequence portion
ccccucguugcccaggcuuuca

SEQ ID NO: 5911 - RNA, 22 nt, Artificial Sequence
  C3-targeting RNA guide sequence portion
ccccugaauccacaaacaccca

SEQ ID NO: 5912 - RNA, 22 nt, Artificial Sequence
  C3-targeting RNA guide sequence portion
cccgaaguagccaaucuuuaaa

SEQ ID NO: 5913 - RNA, 22 nt, Artificial Sequence
  C3-targeting RNA guide sequence portion
cccggacacccucaacucuacc

SEQ ID NO: 5914 - RNA, 22 nt, Artificial Sequence
  C3-targeting RNA guide sequence portion
cccuaaaccaacagaugaccuc

SEQ ID NO: 5915 - RNA, 22 nt, Artificial Sequence
  C3-targeting RNA guide sequence portion
cccuaaaccucuaccucucuaa

SEQ ID NO: 5916 - RNA, 22 nt, Artificial Sequence
  C3-targeting RNA guide sequence portion
cccucaacucuaccuacccaaa

SEQ ID NO: 5917 - RNA, 22 nt, Artificial Sequence
  C3-targeting RNA guide sequence portion
cccucguugcccaggcuuucaa

SEQ ID NO: 5918 - RNA, 22 nt, Artificial Sequence
  C3-targeting RNA guide sequence portion
cccugaaccuuccaaccagcgu

SEQ ID NO: 5919 - RNA, 22 nt, Artificial Sequence
  C3-targeting RNA guide sequence portion
cccugaauccacaaacacccaa

SEQ ID NO: 5920 - RNA, 22 nt, Artificial Sequence
  C3-targeting RNA guide sequence portion
cccugaauucuacagggaccug

SEQ ID NO: 5921 - RNA, 22 nt, Artificial Sequence
  C3-targeting RNA guide sequence portion
cccuguagaauucagggugcau

SEQ ID NO: 5922 - RNA, 22 nt, Artificial Sequence
  C3-targeting RNA guide sequence portion
cccuguuuguggguagagucau

SEQ ID NO: 5923 - RNA, 22 nt, Artificial Sequence
  C3-targeting RNA guide sequence portion
ccgaaguagccaaucuuuaaac

SEQ ID NO: 5924 - RNA, 22 nt, Artificial Sequence
  C3-targeting RNA guide sequence portion
ccgcaccaucaaugaacaccac

SEQ ID NO: 5925 - RNA, 22 nt, Artificial Sequence
  C3-targeting RNA guide sequence portion
ccggacacccucaacucuaccu

SEQ ID NO: 5926 - RNA, 22 nt, Artificial Sequence
  C3-targeting RNA guide sequence portion
ccggcagucacuggauccucuc

SEQ ID NO: 5927 - RNA, 22 nt, Artificial Sequence
  C3-targeting RNA guide sequence portion
ccggcgcacuugccaaugccau

SEQ ID NO: 5928 - RNA, 22 nt, Artificial Sequence
  C3-targeting RNA guide sequence portion
ccgggaguuugaguguuuacau

SEQ ID NO: 5929 - RNA, 22 nt, Artificial Sequence
  C3-targeting RNA guide sequence portion
ccgucucaaccacaugggcagg

SEQ ID NO: 5930 - RNA, 22 nt, Artificial Sequence
  C3-targeting RNA guide sequence portion
ccguggaaugacaagcccacuc

SEQ ID NO: 5931 - RNA, 22 nt, Artificial Sequence
  C3-targeting RNA guide sequence portion
ccuaaaccaacagaugaccuca

SEQ ID NO: 5932 - RNA, 22 nt, Artificial Sequence
  C3-targeting RNA guide sequence portion
ccuaaacccacacaugccccaa

SEQ ID NO: 5933 - RNA, 22 nt, Artificial Sequence
  C3-targeting RNA guide sequence portion
ccuaaaccuccaacaccccagu

SEQ ID NO: 5934 - RNA, 22 nt, Artificial Sequence
  C3-targeting RNA guide sequence portion
ccuaaaccucuaccucucuaaa

SEQ ID NO: 5935 - RNA, 22 nt, Artificial Sequence
  C3-targeting RNA guide sequence portion
ccuacccaaacccacauacgcc

SEQ ID NO: 5936 - RNA, 22 nt, Artificial Sequence
  C3-targeting RNA guide sequence portion
ccucaaaucuuagagcacccca

SEQ ID NO: 5937 - RNA, 22 nt, Artificial Sequence
  C3-targeting RNA guide sequence portion
ccucaacucuaccuacccaaac

SEQ ID NO: 5938 - RNA, 22 nt, Artificial Sequence
  C3-targeting RNA guide sequence portion
ccucaauucuagaaacauccca

SEQ ID NO: 5939 - RNA, 22 nt, Artificial Sequence
  C3-targeting RNA guide sequence portion
ccucacuggagucagcgccugg

SEQ ID NO: 5940 - RNA, 22 nt, Artificial Sequence
  C3-targeting RNA guide sequence portion
ccuccaacaccccaguccuaau

SEQ ID NO: 5941 - RNA, 22 nt, Artificial Sequence
  C3-targeting RNA guide sequence portion
ccuccaagucucuggacuucca

SEQ ID NO: 5942 - RNA, 22 nt, Artificial Sequence
  C3-targeting RNA guide sequence portion
ccucguugcccaggcuuucaaa

SEQ ID NO: 5943 - RNA, 22 nt, Artificial Sequence
  C3-targeting RNA guide sequence portion
ccucuaaaccucaaaucuuaga

SEQ ID NO: 5944 - RNA, 22 nt, Artificial Sequence
  C3-targeting RNA guide sequence portion
ccucuaccucucuaaacacucc

SEQ ID NO: 5945 - RNA, 22 nt, Artificial Sequence
  C3-targeting RNA guide sequence portion
ccucuccaggaccagaggcugg

SEQ ID NO: 5946 - RNA, 22 nt, Artificial Sequence
  C3-targeting RNA guide sequence portion
ccucucuaaacacuccaaauau

SEQ ID NO: 5947 - RNA, 22 nt, Artificial Sequence
  C3-targeting RNA guide sequence portion
ccucugguccuggagaggaucc

SEQ ID NO: 5948 - RNA, 22 nt, Artificial Sequence
  C3-targeting RNA guide sequence portion
ccugaaccuuccaaccagcguc

SEQ ID NO: 5949 - RNA, 22 nt, Artificial Sequence
  C3-targeting RNA guide sequence portion
ccugaauccacaaacacccaaa

SEQ ID NO: 5950 - RNA, 22 nt, Artificial Sequence
  C3-targeting RNA guide sequence portion
ccugaauucuacagggaccugg

SEQ ID NO: 5951 - RNA, 22 nt, Artificial Sequence
  C3-targeting RNA guide sequence portion
ccugagaguuuggguguuuaug

SEQ ID NO: 5952 - RNA, 22 nt, Artificial Sequence
  C3-targeting RNA guide sequence portion
ccugccaggcgcugacuccagu

SEQ ID NO: 5953 - RNA, 22 nt, Artificial Sequence
  C3-targeting RNA guide sequence portion
ccugcccaugugguugagacgg

SEQ ID NO: 5954 - RNA, 22 nt, Artificial Sequence
  C3-targeting RNA guide sequence portion
ccugcuaaccccugaauccaca

SEQ ID NO: 5955 - RNA, 22 nt, Artificial Sequence
  C3-targeting RNA guide sequence portion
ccuggacccccaaaugucugcu

SEQ ID NO: 5956 - RNA, 22 nt, Artificial Sequence
  C3-targeting RNA guide sequence portion
ccuggagaggauccagugacug

SEQ ID NO: 5957 - RNA, 22 nt, Artificial Sequence
  C3-targeting RNA guide sequence portion
ccuggauuccacaaacacccaa

SEQ ID NO: 5958 - RNA, 22 nt, Artificial Sequence
  C3-targeting RNA guide sequence portion
ccuggcaggcugugugccccag

SEQ ID NO: 5959 - RNA, 22 nt, Artificial Sequence
  C3-targeting RNA guide sequence portion
ccuggccuuugaaagccugggc

SEQ ID NO: 5960 - RNA, 22 nt, Artificial Sequence
  C3-targeting RNA guide sequence portion
ccugggcaacgagggggccaca

SEQ ID NO: 5961 - RNA, 22 nt, Artificial Sequence
  C3-targeting RNA guide sequence portion
ccuguagaauucagggugcauu

SEQ ID NO: 5962 - RNA, 22 nt, Artificial Sequence
  C3-targeting RNA guide sequence portion
ccuguuuguggguagagucaua

SEQ ID NO: 5963 - RNA, 22 nt, Artificial Sequence
  C3-targeting RNA guide sequence portion
ccuuccaaccagcgucagcaac

SEQ ID NO: 5964 - RNA, 22 nt, Artificial Sequence
  C3-targeting RNA guide sequence portion
ccuuugaaagccugggcaacga

SEQ ID NO: 5965 - RNA, 22 nt, Artificial Sequence
  C3-targeting RNA guide sequence portion
cgaaguagccaaucuuuaaacc

SEQ ID NO: 5966 - RNA, 22 nt, Artificial Sequence
  C3-targeting RNA guide sequence portion
cgagggggccacacaucccacc

SEQ ID NO: 5967 - RNA, 22 nt, Artificial Sequence
  C3-targeting RNA guide sequence portion
cgauaccuggauuccacaaaca

SEQ ID NO: 5968 - RNA, 22 nt, Artificial Sequence
  C3-targeting RNA guide sequence portion
cgauugugggucuggaagucca

SEQ ID NO: 5969 - RNA, 22 nt, Artificial Sequence
  C3-targeting RNA guide sequence portion
cgcaccaucaaugaacaccaca

SEQ ID NO: 5970 - RNA, 22 nt, Artificial Sequence
  C3-targeting RNA guide sequence portion
cgcacuugccaaugccauuauc

SEQ ID NO: 5971 - RNA, 22 nt, Artificial Sequence
  C3-targeting RNA guide sequence portion
cgccaaaaccucuaaaccucaa

SEQ ID NO: 5972 - RNA, 22 nt, Artificial Sequence
  C3-targeting RNA guide sequence portion
cgccaguccucacuggagucag

SEQ ID NO: 5973 - RNA, 22 nt, Artificial Sequence
  C3-targeting RNA guide sequence portion
cgccggcagucacuggauccuc

SEQ ID NO: 5974 - RNA, 22 nt, Artificial Sequence
  C3-targeting RNA guide sequence portion
cgccuaaacccacacaugcccc

SEQ ID NO: 5975 - RNA, 22 nt, Artificial Sequence
  C3-targeting RNA guide sequence portion
cgccuggcaggcugugugcccc

SEQ ID NO: 5976 - RNA, 22 nt, Artificial Sequence
  C3-targeting RNA guide sequence portion
cgcugacuccagugaggacugg

SEQ ID NO: 5977 - RNA, 22 nt, Artificial Sequence
  C3-targeting RNA guide sequence portion
cgcugguuggaagguucagggu

SEQ ID NO: 5978 - RNA, 22 nt, Artificial Sequence
  C3-targeting RNA guide sequence portion
cggacacccucaacucuaccua

SEQ ID NO: 5979 - RNA, 22 nt, Artificial Sequence
  C3-targeting RNA guide sequence portion
cggagguuuggacuuuacaaga

SEQ ID NO: 5980 - RNA, 22 nt, Artificial Sequence
  C3-targeting RNA guide sequence portion
cggaguggggcacgggaguggg

SEQ ID NO: 5981 - RNA, 22 nt, Artificial Sequence
  C3-targeting RNA guide sequence portion
cggaugugagacgccaguccuc

SEQ ID NO: 5982 - RNA, 22 nt, Artificial Sequence
  C3-targeting RNA guide sequence portion
cggcagucacuggauccucucc

SEQ ID NO: 5983 - RNA, 22 nt, Artificial Sequence
  C3-targeting RNA guide sequence portion
cggcgcacuugccaaugccauu

SEQ ID NO: 5984 - RNA, 22 nt, Artificial Sequence
  C3-targeting RNA guide sequence portion
cgggagugggcuugucauucca

SEQ ID NO: 5985 - RNA, 22 nt, Artificial Sequence
  C3-targeting RNA guide sequence portion
cgggaguuugaguguuuacaua

SEQ ID NO: 5986 - RNA, 22 nt, Artificial Sequence
  C3-targeting RNA guide sequence portion
cggguucauguauaguuggggc

SEQ ID NO: 5987 - RNA, 22 nt, Artificial Sequence
  C3-targeting RNA guide sequence portion
cgguggcagugcccagagaaga

SEQ ID NO: 5988 - RNA, 22 nt, Artificial Sequence
  C3-targeting RNA guide sequence portion
cguauguggguuuggguaggua

SEQ ID NO: 5989 - RNA, 22 nt, Artificial Sequence
  C3-targeting RNA guide sequence portion
cgucagcaacuccuccaagucu

SEQ ID NO: 5990 - RNA, 22 nt, Artificial Sequence
  C3-targeting RNA guide sequence portion
cgucucaaccacaugggcagga

SEQ ID NO: 5991 - RNA, 22 nt, Artificial Sequence
  C3-targeting RNA guide sequence portion
cguggaaugacaagcccacucc

SEQ ID NO: 5992 - RNA, 22 nt, Artificial Sequence
  C3-targeting RNA guide sequence portion
cguggaauuggaguuuauauac

SEQ ID NO: 5993 - RNA, 22 nt, Artificial Sequence
  C3-targeting RNA guide sequence portion
cguugcccaggcuuucaaaggc

SEQ ID NO: 5994 - RNA, 22 nt, Artificial Sequence
  C3-targeting RNA guide sequence portion
cuaaacacuccaaauauguaaa

SEQ ID NO: 5995 - RNA, 22 nt, Artificial Sequence
  C3-targeting RNA guide sequence portion
cuaaaccaacagaugaccucaa

SEQ ID NO: 5996 - RNA, 22 nt, Artificial Sequence
  C3-targeting RNA guide sequence portion
cuaaacccacacaugccccaaa

SEQ ID NO: 5997 - RNA, 22 nt, Artificial Sequence
  C3-targeting RNA guide sequence portion
cuaaaccucaaaucuuagagca

SEQ ID NO: 5998 - RNA, 22 nt, Artificial Sequence
  C3-targeting RNA guide sequence portion
cuaaaccuccaacaccccaguc

SEQ ID NO: 5999 - RNA, 22 nt, Artificial Sequence
  C3-targeting RNA guide sequence portion
cuaaaccucuaccucucuaaac

SEQ ID NO: 6000 - RNA, 22 nt, Artificial Sequence
  C3-targeting RNA guide sequence portion
cuaaccccugaauccacaaaca

SEQ ID NO: 6001 - RNA, 22 nt, Artificial Sequence
  C3-targeting RNA guide sequence portion
cuaagauuugagguuuagaggu

SEQ ID NO: 6002 - RNA, 22 nt, Artificial Sequence
  C3-targeting RNA guide sequence portion
cuacagggaccuggacccccaa

SEQ ID NO: 6003 - RNA, 22 nt, Artificial Sequence
  C3-targeting RNA guide sequence portion
cuacccaaacccacauacgcca

SEQ ID NO: 6004 - RNA, 22 nt, Artificial Sequence
  C3-targeting RNA guide sequence portion
cuacccacaaacagggcugguu

SEQ ID NO: 6005 - RNA, 22 nt, Artificial Sequence
  C3-targeting RNA guide sequence portion
cuaccuacccaaacccacauac

SEQ ID NO: 6006 - RNA, 22 nt, Artificial Sequence
  C3-targeting RNA guide sequence portion
cuaccucucuaaacacuccaaa

SEQ ID NO: 6007 - RNA, 22 nt, Artificial Sequence
  C3-targeting RNA guide sequence portion
cuacuucggguucauguauagu

SEQ ID NO: 6008 - RNA, 22 nt, Artificial Sequence
  C3-targeting RNA guide sequence portion
cuagaaacaucccaaacuccaa

SEQ ID NO: 6009 - RNA, 22 nt, Artificial Sequence
  C3-targeting RNA guide sequence portion
cuagaauugaggucaucuguug

SEQ ID NO: 6010 - RNA, 22 nt, Artificial Sequence
  C3-targeting RNA guide sequence portion
cuauacaugaacccgaaguagc

SEQ ID NO: 6011 - RNA, 22 nt, Artificial Sequence
  C3-targeting RNA guide sequence portion
cucaaacucccggacacccuca

SEQ ID NO: 6012 - RNA, 22 nt, Artificial Sequence
  C3-targeting RNA guide sequence portion
cucaaaucuuagagcaccccaa

SEQ ID NO: 6013 - RNA, 22 nt, Artificial Sequence
  C3-targeting RNA guide sequence portion
cucaaccacaugggcaggacag

SEQ ID NO: 6014 - RNA, 22 nt, Artificial Sequence
  C3-targeting RNA guide sequence portion
cucaacucuaccuacccaaacc

SEQ ID NO: 6015 - RNA, 22 nt, Artificial Sequence
  C3-targeting RNA guide sequence portion
cucaauucuagaaacaucccaa

SEQ ID NO: 6016 - RNA, 22 nt, Artificial Sequence
  C3-targeting RNA guide sequence portion
cucacaggcagcccaaauauau

SEQ ID NO: 6017 - RNA, 22 nt, Artificial Sequence
  C3-targeting RNA guide sequence portion
cucacaggcagcccaaauguau

SEQ ID NO: 6018 - RNA, 22 nt, Artificial Sequence
  C3-targeting RNA guide sequence portion
cucacauccguggaaugacaag

SEQ ID NO: 6019 - RNA, 22 nt, Artificial Sequence
  C3-targeting RNA guide sequence portion
cucacuggagucagcgccuggc

SEQ ID NO: 6020 - RNA, 22 nt, Artificial Sequence
  C3-targeting RNA guide sequence portion
cucagccagcugggccuggccu

SEQ ID NO: 6021 - RNA, 22 nt, Artificial Sequence
  C3-targeting RNA guide sequence portion
cucaggcagcccaaauguauau

SEQ ID NO: 6022 - RNA, 22 nt, Artificial Sequence
  C3-targeting RNA guide sequence portion
cuccaaauauguaaacacucaa

SEQ ID NO: 6023 - RNA, 22 nt, Artificial Sequence
  C3-targeting RNA guide sequence portion
cuccaacaccccaguccuaaua

SEQ ID NO: 6024 - RNA, 22 nt, Artificial Sequence
  C3-targeting RNA guide sequence portion
cuccaagucucuggacuuccag

SEQ ID NO: 6025 - RNA, 22 nt, Artificial Sequence
  C3-targeting RNA guide sequence portion
cuccaauuccaccauaccugga

SEQ ID NO: 6026 - RNA, 22 nt, Artificial Sequence
  C3-targeting RNA guide sequence portion
cuccaauuccacgauaccugga

SEQ ID NO: 6027 - RNA, 22 nt, Artificial Sequence
  C3-targeting RNA guide sequence portion
cuccaauuccaugauaccugga

SEQ ID NO: 6028 - RNA, 22 nt, Artificial Sequence
  C3-targeting RNA guide sequence portion
cuccaggaccagaggcuggggc

SEQ ID NO: 6029 - RNA, 22 nt, Artificial Sequence
  C3-targeting RNA guide sequence portion
cuccagugaggacuggcgucuc

SEQ ID NO: 6030 - RNA, 22 nt, Artificial Sequence
  C3-targeting RNA guide sequence portion
cucccaaaucuuguaaagucca

SEQ ID NO: 6031 - RNA, 22 nt, Artificial Sequence
  C3-targeting RNA guide sequence portion
cucccacucucagccagcuggg

SEQ ID NO: 6032 - RNA, 22 nt, Artificial Sequence
  C3-targeting RNA guide sequence portion
cucccggacacccucaacucua

SEQ ID NO: 6033 - RNA, 22 nt, Artificial Sequence
  C3-targeting RNA guide sequence portion
cuccuccaagucucuggacuuc

SEQ ID NO: 6034 - RNA, 22 nt, Artificial Sequence
  C3-targeting RNA guide sequence portion
cucggagguuuggacuuuacaa

SEQ ID NO: 6035 - RNA, 22 nt, Artificial Sequence
  C3-targeting RNA guide sequence portion
cucguugcccaggcuuucaaag

SEQ ID NO: 6036 - RNA, 22 nt, Artificial Sequence
  C3-targeting RNA guide sequence portion
cucuaaacacuccaaauaugua

SEQ ID NO: 6037 - RNA, 22 nt, Artificial Sequence
  C3-targeting RNA guide sequence portion
cucuaaaccucaaaucuuagag

SEQ ID NO: 6038 - RNA, 22 nt, Artificial Sequence
  C3-targeting RNA guide sequence portion
cucuaagauuugagguuuagag

SEQ ID NO: 6039 - RNA, 22 nt, Artificial Sequence
  C3-targeting RNA guide sequence portion
cucuacccacaaacagggcugg

SEQ ID NO: 6040 - RNA, 22 nt, Artificial Sequence
  C3-targeting RNA guide sequence portion
cucuaccuacccaaacccacau

SEQ ID NO: 6041 - RNA, 22 nt, Artificial Sequence
  C3-targeting RNA guide sequence portion
cucuaccucucuaaacacucca

SEQ ID NO: 6042 - RNA, 22 nt, Artificial Sequence
  C3-targeting RNA guide sequence portion
cucucagccagcugggccuggc

SEQ ID NO: 6043 - RNA, 22 nt, Artificial Sequence
  C3-targeting RNA guide sequence portion
cucucaggcagcccaaauguau

SEQ ID NO: 6044 - RNA, 22 nt, Artificial Sequence
  C3-targeting RNA guide sequence portion
cucuccaggaccagaggcuggg

SEQ ID NO: 6045 - RNA, 22 nt, Artificial Sequence
  C3-targeting RNA guide sequence portion
cucucuaaacacuccaaauaug

SEQ ID NO: 6046 - RNA, 22 nt, Artificial Sequence
  C3-targeting RNA guide sequence portion
cucuggacuuccagacccacaa

SEQ ID NO: 6047 - RNA, 22 nt, Artificial Sequence
  C3-targeting RNA guide sequence portion
cucugggcacugccaccgucuc

SEQ ID NO: 6048 - RNA, 22 nt, Artificial Sequence
  C3-targeting RNA guide sequence portion
cucugguccuggagaggaucca

SEQ ID NO: 6049 - RNA, 22 nt, Artificial Sequence
  C3-targeting RNA guide sequence portion
cugaaaauugcaaguccccaag

SEQ ID NO: 6050 - RNA, 22 nt, Artificial Sequence
  C3-targeting RNA guide sequence portion
cugaaccuuccaaccagcguca

SEQ ID NO: 6051 - RNA, 22 nt, Artificial Sequence
  C3-targeting RNA guide sequence portion
cugaauccacaaacacccaaau

SEQ ID NO: 6052 - RNA, 22 nt, Artificial Sequence
  C3-targeting RNA guide sequence portion
cugaauucuacagggaccugga

SEQ ID NO: 6053 - RNA, 22 nt, Artificial Sequence
  C3-targeting RNA guide sequence portion
cugacgcugguuggaagguuca

SEQ ID NO: 6054 - RNA, 22 nt, Artificial Sequence
  C3-targeting RNA guide sequence portion
cugacuccagugaggacuggcg

SEQ ID NO: 6055 - RNA, 22 nt, Artificial Sequence
  C3-targeting RNA guide sequence portion
cugagagugggagucauggugg

SEQ ID NO: 6056 - RNA, 22 nt, Artificial Sequence
  C3-targeting RNA guide sequence portion
cugagaguuuggguguuuaugg

SEQ ID NO: 6057 - RNA, 22 nt, Artificial Sequence
  C3-targeting RNA guide sequence portion
cugcaaacucccaaaucuugua

SEQ ID NO: 6058 - RNA, 22 nt, Artificial Sequence
  C3-targeting RNA guide sequence portion
cugccaccgucucaaccacaug

SEQ ID NO: 6059 - RNA, 22 nt, Artificial Sequence
  C3-targeting RNA guide sequence portion
cugccaggcgcugacuccagug

SEQ ID NO: 6060 - RNA, 22 nt, Artificial Sequence
  C3-targeting RNA guide sequence portion
cugcccaugugguugagacggu

SEQ ID NO: 6061 - RNA, 22 nt, Artificial Sequence
  C3-targeting RNA guide sequence portion
cugccggcgcacuugccaaugc

SEQ ID NO: 6062 - RNA, 22 nt, Artificial Sequence
  C3-targeting RNA guide sequence portion
cugccugagaguuuggguguuu

SEQ ID NO: 6063 - RNA, 22 nt, Artificial Sequence
  C3-targeting RNA guide sequence portion
cugcuaaccccugaauccacaa

SEQ ID NO: 6064 - RNA, 22 nt, Artificial Sequence
  C3-targeting RNA guide sequence portion
cugcuguccugcccaugugguu

SEQ ID NO: 6065 - RNA, 22 nt, Artificial Sequence
  C3-targeting RNA guide sequence portion
cugcuuccaccccagaaccagc

SEQ ID NO: 6066 - RNA, 22 nt, Artificial Sequence
  C3-targeting RNA guide sequence portion
cuggaaguccagagacuuggag

SEQ ID NO: 6067 - RNA, 22 nt, Artificial Sequence
  C3-targeting RNA guide sequence portion
cuggacccccaaaugucugcuu

SEQ ID NO: 6068 - RNA, 22 nt, Artificial Sequence
  C3-targeting RNA guide sequence portion
cuggacuuccagacccacaauc

SEQ ID NO: 6069 - RNA, 22 nt, Artificial Sequence
  C3-targeting RNA guide sequence portion
cuggagaggauccagugacugc

SEQ ID NO: 6070 - RNA, 22 nt, Artificial Sequence
  C3-targeting RNA guide sequence portion
cuggagucagcgccuggcaggc

SEQ ID NO: 6071 - RNA, 22 nt, Artificial Sequence
  C3-targeting RNA guide sequence portion
cuggauccucuccaggaccaga

SEQ ID NO: 6072 - RNA, 22 nt, Artificial Sequence
  C3-targeting RNA guide sequence portion
cuggauuccacaaacacccaac

SEQ ID NO: 6073 - RNA, 22 nt, Artificial Sequence
  C3-targeting RNA guide sequence portion
cuggcaggcugugugccccagc

SEQ ID NO: 6074 - RNA, 22 nt, Artificial Sequence
  C3-targeting RNA guide sequence portion
cuggccuuugaaagccugggca

SEQ ID NO: 6075 - RNA, 22 nt, Artificial Sequence
  C3-targeting RNA guide sequence portion
cuggcgucucacauccguggaa

SEQ ID NO: 6076 - RNA, 22 nt, Artificial Sequence
  C3-targeting RNA guide sequence portion
cuggcugagagugggagucaug

SEQ ID NO: 6077 - RNA, 22 nt, Artificial Sequence
  C3-targeting RNA guide sequence portion
cugggcaacgagggggccacac

SEQ ID NO: 6078 - RNA, 22 nt, Artificial Sequence
  C3-targeting RNA guide sequence portion
cugggcacugccaccgucucaa

SEQ ID NO: 6079 - RNA, 22 nt, Artificial Sequence
  C3-targeting RNA guide sequence portion
cugggccuggccuuugaaagcc

SEQ ID NO: 6080 - RNA, 22 nt, Artificial Sequence
  C3-targeting RNA guide sequence portion
cuggggcacacagccugccagg

SEQ ID NO: 6081 - RNA, 22 nt, Artificial Sequence
  C3-targeting RNA guide sequence portion
cugggguggaagcagacauuug

SEQ ID NO: 6082 - RNA, 22 nt, Artificial Sequence
  C3-targeting RNA guide sequence portion
cugggguguuggagguuuaggc

SEQ ID NO: 6083 - RNA, 22 nt, Artificial Sequence
  C3-targeting RNA guide sequence portion
cuggguuuggggugcucuaaga

SEQ ID NO: 6084 - RNA, 22 nt, Artificial Sequence
  C3-targeting RNA guide sequence portion
cugguccuggagaggauccagu

SEQ ID NO: 6085 - RNA, 22 nt, Artificial Sequence
  C3-targeting RNA guide sequence portion
cugguucugggguggaagcaga

SEQ ID NO: 6086 - RNA, 22 nt, Artificial Sequence
  C3-targeting RNA guide sequence portion
cugguuggaagguucaggguuu

SEQ ID NO: 6087 - RNA, 22 nt, Artificial Sequence
  C3-targeting RNA guide sequence portion
cuguagaauucagggugcauuu

SEQ ID NO: 6088 - RNA, 22 nt, Artificial Sequence
  C3-targeting RNA guide sequence portion
cuguccugcccaugugguugag

SEQ ID NO: 6089 - RNA, 22 nt, Artificial Sequence
  C3-targeting RNA guide sequence portion
cugucggaguggggcacgggag

SEQ ID NO: 6090 - RNA, 22 nt, Artificial Sequence
  C3-targeting RNA guide sequence portion
cugugugccccagccucugguc

SEQ ID NO: 6091 - RNA, 22 nt, Artificial Sequence
  C3-targeting RNA guide sequence portion
cuguugguuuaggguguaugug

SEQ ID NO: 6092 - RNA, 22 nt, Artificial Sequence
  C3-targeting RNA guide sequence portion
cuguuuguggguagagucauaa

SEQ ID NO: 6093 - RNA, 22 nt, Artificial Sequence
  C3-targeting RNA guide sequence portion
cuuagagcaccccaaacccagc

SEQ ID NO: 6094 - RNA, 22 nt, Artificial Sequence
  C3-targeting RNA guide sequence portion
cuuccaaccagcgucagcaacu

SEQ ID NO: 6095 - RNA, 22 nt, Artificial Sequence
  C3-targeting RNA guide sequence portion
cuuccaccccagaaccagcccu

SEQ ID NO: 6096 - RNA, 22 nt, Artificial Sequence
  C3-targeting RNA guide sequence portion
cuuccagacccacaaucgccua

SEQ ID NO: 6097 - RNA, 22 nt, Artificial Sequence
  C3-targeting RNA guide sequence portion
cuucggguucauguauaguugg

SEQ ID NO: 6098 - RNA, 22 nt, Artificial Sequence
  C3-targeting RNA guide sequence portion
cuucucugggcacugccaccgu

SEQ ID NO: 6099 - RNA, 22 nt, Artificial Sequence
  C3-targeting RNA guide sequence portion
cuugcaauuuucaguguggguu

SEQ ID NO: 6100 - RNA, 22 nt, Artificial Sequence
  C3-targeting RNA guide sequence portion
cuugccaaugccauuaucuucu

SEQ ID NO: 6101 - RNA, 22 nt, Artificial Sequence
  C3-targeting RNA guide sequence portion
cuuggaggaguugcugacgcug

SEQ ID NO: 6102 - RNA, 22 nt, Artificial Sequence
  C3-targeting RNA guide sequence portion
cuuggggacuugcaauuuucag

SEQ ID NO: 6103 - RNA, 22 nt, Artificial Sequence
  C3-targeting RNA guide sequence portion
cuuguaaaguccaaaccuccga

SEQ ID NO: 6104 - RNA, 22 nt, Artificial Sequence
  C3-targeting RNA guide sequence portion
cuugucauuccacggaugugag

SEQ ID NO: 6105 - RNA, 22 nt, Artificial Sequence
  C3-targeting RNA guide sequence portion
cuuuaaacccacacugaaaauu

SEQ ID NO: 6106 - RNA, 22 nt, Artificial Sequence
  C3-targeting RNA guide sequence portion
cuuuacaagauuugggaguuug

SEQ ID NO: 6107 - RNA, 22 nt, Artificial Sequence
  C3-targeting RNA guide sequence portion
cuuucaaaggccaggcccagcu

SEQ ID NO: 6108 - RNA, 22 nt, Artificial Sequence
  C3-targeting RNA guide sequence portion
cuuugaaagccugggcaacgag

SEQ ID NO: 6109 - RNA, 22 nt, Artificial Sequence
  C3-targeting RNA guide sequence portion
gaaaauugcaaguccccaagcu

SEQ ID NO: 6110 - RNA, 22 nt, Artificial Sequence
  C3-targeting RNA guide sequence portion
gaaacaucccaaacuccaauuc

SEQ ID NO: 6111 - RNA, 22 nt, Artificial Sequence
  C3-targeting RNA guide sequence portion
gaaagccugggcaacgaggggg

SEQ ID NO: 6112 - RNA, 22 nt, Artificial Sequence
  C3-targeting RNA guide sequence portion
gaacaccacauacacccuaaac

SEQ ID NO: 6113 - RNA, 22 nt, Artificial Sequence
  C3-targeting RNA guide sequence portion
gaaccagcccuguuugugggua

SEQ ID NO: 6114 - RNA, 22 nt, Artificial Sequence
  C3-targeting RNA guide sequence portion
gaacccgaaguagccaaucuuu

SEQ ID NO: 6115 - RNA, 22 nt, Artificial Sequence
  C3-targeting RNA guide sequence portion
gaaccuuccaaccagcgucagc

SEQ ID NO: 6116 - RNA, 22 nt, Artificial Sequence
  C3-targeting RNA guide sequence portion
gaagauaauggcauuggcaagu

SEQ ID NO: 6117 - RNA, 22 nt, Artificial Sequence
  C3-targeting RNA guide sequence portion
gaagcagacauuugggggucca

SEQ ID NO: 6118 - RNA, 22 nt, Artificial Sequence
  C3-targeting RNA guide sequence portion
gaagguucaggguuugguggga

SEQ ID NO: 6119 - RNA, 22 nt, Artificial Sequence
  C3-targeting RNA guide sequence portion
gaaguagccaaucuuuaaaccc

SEQ ID NO: 6120 - RNA, 22 nt, Artificial Sequence
  C3-targeting RNA guide sequence portion
gaaguccagagacuuggaggag

SEQ ID NO: 6121 - RNA, 22 nt, Artificial Sequence
  C3-targeting RNA guide sequence portion
gaauccacaaacacccaaaugc

SEQ ID NO: 6122 - RNA, 22 nt, Artificial Sequence
  C3-targeting RNA guide sequence portion
gaauccagguaucauggaauug

SEQ ID NO: 6123 - RNA, 22 nt, Artificial Sequence
  C3-targeting RNA guide sequence portion
gaauccagguaucguggaauug

SEQ ID NO: 6124 - RNA, 22 nt, Artificial Sequence
  C3-targeting RNA guide sequence portion
gaauccagguaugguggaauug

SEQ ID NO: 6125 - RNA, 22 nt, Artificial Sequence
  C3-targeting RNA guide sequence portion
gaaugacaagcccacucccgug

SEQ ID NO: 6126 - RNA, 22 nt, Artificial Sequence
  C3-targeting RNA guide sequence portion
gaaugauuauauauauuugggc

SEQ ID NO: 6127 - RNA, 22 nt, Artificial Sequence
  C3-targeting RNA guide sequence portion
gaauucagggugcauuugggug

SEQ ID NO: 6128 - RNA, 22 nt, Artificial Sequence
  C3-targeting RNA guide sequence portion
gaauucuacagggaccuggacc

SEQ ID NO: 6129 - RNA, 22 nt, Artificial Sequence
  C3-targeting RNA guide sequence portion
gaauugaggucaucuguugguu

SEQ ID NO: 6130 - RNA, 22 nt, Artificial Sequence
  C3-targeting RNA guide sequence portion
gaauugauuguauuuauuagga

SEQ ID NO: 6131 - RNA, 22 nt, Artificial Sequence
  C3-targeting RNA guide sequence portion
gaauuggaguuugggauguuuc

SEQ ID NO: 6132 - RNA, 22 nt, Artificial Sequence
  C3-targeting RNA guide sequence portion
gacaagcccacucccgugcccc

SEQ ID NO: 6133 - RNA, 22 nt, Artificial Sequence
  C3-targeting RNA guide sequence portion
gacacccucaacucuaccuacc

SEQ ID NO: 6134 - RNA, 22 nt, Artificial Sequence
  C3-targeting RNA guide sequence portion
gacagcagccaccaugacuccc

SEQ ID NO: 6135 - RNA, 22 nt, Artificial Sequence
  C3-targeting RNA guide sequence portion
gacauuuggggguccagguccc

SEQ ID NO: 6136 - RNA, 22 nt, Artificial Sequence
  C3-targeting RNA guide sequence portion
gaccagaggcuggggcacacag

SEQ ID NO: 6137 - RNA, 22 nt, Artificial Sequence
  C3-targeting RNA guide sequence portion
gacccacaaucgccuaaaccca

SEQ ID NO: 6138 - RNA, 22 nt, Artificial Sequence
  C3-targeting RNA guide sequence portion
gacccccaaaugucugcuucca

SEQ ID NO: 6139 - RNA, 22 nt, Artificial Sequence
  C3-targeting RNA guide sequence portion
gaccucaauucuagaaacaucc

SEQ ID NO: 6140 - RNA, 22 nt, Artificial Sequence
  C3-targeting RNA guide sequence portion
gaccuggacccccaaaugucug

SEQ ID NO: 6141 - RNA, 22 nt, Artificial Sequence
  C3-targeting RNA guide sequence portion
gacgccaguccucacuggaguc

SEQ ID NO: 6142 - RNA, 22 nt, Artificial Sequence
  C3-targeting RNA guide sequence portion
gacgcugguuggaagguucagg

SEQ ID NO: 6143 - RNA, 22 nt, Artificial Sequence
  C3-targeting RNA guide sequence portion
gacgguggcagugcccagagaa

SEQ ID NO: 6144 - RNA, 22 nt, Artificial Sequence
  C3-targeting RNA guide sequence portion
gacuccagugaggacuggcguc

SEQ ID NO: 6145 - RNA, 22 nt, Artificial Sequence
  C3-targeting RNA guide sequence portion
gacucccacucucagccagcug

SEQ ID NO: 6146 - RNA, 22 nt, Artificial Sequence
  C3-targeting RNA guide sequence portion
gacucggagguuuggacuuuac

SEQ ID NO: 6147 - RNA, 22 nt, Artificial Sequence
  C3-targeting RNA guide sequence portion
gacucuacccacaaacagggcu

SEQ ID NO: 6148 - RNA, 22 nt, Artificial Sequence
  C3-targeting RNA guide sequence portion
gacugccggcgcacuugccaau

SEQ ID NO: 6149 - RNA, 22 nt, Artificial Sequence
  C3-targeting RNA guide sequence portion
gacuggcgucucacauccgugg

SEQ ID NO: 6150 - RNA, 22 nt, Artificial Sequence
  C3-targeting RNA guide sequence portion
gacugggguguuggagguuuag

SEQ ID NO: 6151 - RNA, 22 nt, Artificial Sequence
  C3-targeting RNA guide sequence portion
gacuuccagacccacaaucgcc

SEQ ID NO: 6152 - RNA, 22 nt, Artificial Sequence
  C3-targeting RNA guide sequence portion
gacuugcaauuuucaguguggg

SEQ ID NO: 6153 - RNA, 22 nt, Artificial Sequence
  C3-targeting RNA guide sequence portion
gacuuggaggaguugcugacgc

SEQ ID NO: 6154 - RNA, 22 nt, Artificial Sequence
  C3-targeting RNA guide sequence portion
gacuuuacaagauuugggaguu

SEQ ID NO: 6155 - RNA, 22 nt, Artificial Sequence
  C3-targeting RNA guide sequence portion
gagaagauaauggcauuggcaa

SEQ ID NO: 6156 - RNA, 22 nt, Artificial Sequence
  C3-targeting RNA guide sequence portion
gagacgccaguccucacuggag

SEQ ID NO: 6157 - RNA, 22 nt, Artificial Sequence
  C3-targeting RNA guide sequence portion
gagacgguggcagugcccagag

SEQ ID NO: 6158 - RNA, 22 nt, Artificial Sequence
  C3-targeting RNA guide sequence portion
gagacucggagguuuggacuuu

SEQ ID NO: 6159 - RNA, 22 nt, Artificial Sequence
  C3-targeting RNA guide sequence portion
gagacuuggaggaguugcugac

SEQ ID NO: 6160 - RNA, 22 nt, Artificial Sequence
  C3-targeting RNA guide sequence portion
gagaggauccagugacugccgg

SEQ ID NO: 6161 - RNA, 22 nt, Artificial Sequence
  C3-targeting RNA guide sequence portion
gagagguagagguuuaggguuu

SEQ ID NO: 6162 - RNA, 22 nt, Artificial Sequence
  C3-targeting RNA guide sequence portion
gagagugggagucaugguggcu

SEQ ID NO: 6163 - RNA, 22 nt, Artificial Sequence
  C3-targeting RNA guide sequence portion
gagaguuuggguguuuaugggu

SEQ ID NO: 6164 - RNA, 22 nt, Artificial Sequence
  C3-targeting RNA guide sequence portion
gagcaccccaaacccagccuaa

SEQ ID NO: 6165 - RNA, 22 nt, Artificial Sequence
  C3-targeting RNA guide sequence portion
gaggacuggcgucucacauccg

SEQ ID NO: 6166 - RNA, 22 nt, Artificial Sequence
  C3-targeting RNA guide sequence portion
gaggaguugcugacgcugguug

SEQ ID NO: 6167 - RNA, 22 nt, Artificial Sequence
  C3-targeting RNA guide sequence portion
gaggauccagugacugccggcg

SEQ ID NO: 6168 - RNA, 22 nt, Artificial Sequence
  C3-targeting RNA guide sequence portion
gaggcuggggcacacagccugc

SEQ ID NO: 6169 - RNA, 22 nt, Artificial Sequence
  C3-targeting RNA guide sequence portion
gagggggccacacaucccacca

SEQ ID NO: 6170 - RNA, 22 nt, Artificial Sequence
  C3-targeting RNA guide sequence portion
gaggguguccgggaguuugagu

SEQ ID NO: 6171 - RNA, 22 nt, Artificial Sequence
  C3-targeting RNA guide sequence portion
gagguagagguuuaggguuugg

SEQ ID NO: 6172 - RNA, 22 nt, Artificial Sequence
  C3-targeting RNA guide sequence portion
gaggucaucuguugguuuaggg

SEQ ID NO: 6173 - RNA, 22 nt, Artificial Sequence
  C3-targeting RNA guide sequence portion
gagguuuagagguuuuggcgua

SEQ ID NO: 6174 - RNA, 22 nt, Artificial Sequence
  C3-targeting RNA guide sequence portion
gagguuuaggcuggguuugggg

SEQ ID NO: 6175 - RNA, 22 nt, Artificial Sequence
  C3-targeting RNA guide sequence portion
gagguuuaggguuuggggcaug

SEQ ID NO: 6176 - RNA, 22 nt, Artificial Sequence
  C3-targeting RNA guide sequence portion
gagguuuggacuuuacaagauu

SEQ ID NO: 6177 - RNA, 22 nt, Artificial Sequence
  C3-targeting RNA guide sequence portion
gagguuuuggcguauguggguu

SEQ ID NO: 6178 - RNA, 22 nt, Artificial Sequence
  C3-targeting RNA guide sequence portion
gagucagcgccuggcaggcugu

SEQ ID NO: 6179 - RNA, 22 nt, Artificial Sequence
  C3-targeting RNA guide sequence portion
gagucaugguggcugcuguccu

SEQ ID NO: 6180 - RNA, 22 nt, Artificial Sequence
  C3-targeting RNA guide sequence portion
gagugggagucaugguggcugc

SEQ ID NO: 6181 - RNA, 22 nt, Artificial Sequence
  C3-targeting RNA guide sequence portion
gagugggcuugucauuccacgg

SEQ ID NO: 6182 - RNA, 22 nt, Artificial Sequence
  C3-targeting RNA guide sequence portion
gaguggggcacgggagugggcu

SEQ ID NO: 6183 - RNA, 22 nt, Artificial Sequence
  C3-targeting RNA guide sequence portion
gagugguuaugacucuacccac

SEQ ID NO: 6184 - RNA, 22 nt, Artificial Sequence
  C3-targeting RNA guide sequence portion
gaguguuuacauauuuggagug

SEQ ID NO: 6185 - RNA, 22 nt, Artificial Sequence
  C3-targeting RNA guide sequence portion
gaguguuuagagagguagaggu

SEQ ID NO: 6186 - RNA, 22 nt, Artificial Sequence
  C3-targeting RNA guide sequence portion
gaguugaggguguccgggaguu

SEQ ID NO: 6187 - RNA, 22 nt, Artificial Sequence
  C3-targeting RNA guide sequence portion
gaguugcugacgcugguuggaa

SEQ ID NO: 6188 - RNA, 22 nt, Artificial Sequence
  C3-targeting RNA guide sequence portion
gaguuuauauacauuugggcug

SEQ ID NO: 6189 - RNA, 22 nt, Artificial Sequence
  C3-targeting RNA guide sequence portion
gaguuugaguguuuacauauuu

SEQ ID NO: 6190 - RNA, 22 nt, Artificial Sequence
  C3-targeting RNA guide sequence portion
gaguuugcagcuuggggacuug

SEQ ID NO: 6191 - RNA, 22 nt, Artificial Sequence
  C3-targeting RNA guide sequence portion
gaguuugggauguuucuagaau

SEQ ID NO: 6192 - RNA, 22 nt, Artificial Sequence
  C3-targeting RNA guide sequence portion
gaguuuggguguuuauggguug

SEQ ID NO: 6193 - RNA, 22 nt, Artificial Sequence
  C3-targeting RNA guide sequence portion
gauaauggcauuggcaagugcg

SEQ ID NO: 6194 - RNA, 22 nt, Artificial Sequence
  C3-targeting RNA guide sequence portion
gauccagugacugccggcgcac

SEQ ID NO: 6195 - RNA, 22 nt, Artificial Sequence
  C3-targeting RNA guide sequence portion
gauccucuccaggaccagaggc

SEQ ID NO: 6196 - RNA, 22 nt, Artificial Sequence
  C3-targeting RNA guide sequence portion
gaugaccucaauucuagaaaca

SEQ ID NO: 6197 - RNA, 22 nt, Artificial Sequence
  C3-targeting RNA guide sequence portion
gaugugagacgccaguccucac

SEQ ID NO: 6198 - RNA, 22 nt, Artificial Sequence
  C3-targeting RNA guide sequence portion
gauguguggcccccucguugcc

SEQ ID NO: 6199 - RNA, 22 nt, Artificial Sequence
  C3-targeting RNA guide sequence portion
gauguuucuagaauugagguca

SEQ ID NO: 6200 - RNA, 22 nt, Artificial Sequence
  C3-targeting RNA guide sequence portion
gauuauauauauuugggcugcc

SEQ ID NO: 6201 - RNA, 22 nt, Artificial Sequence
  C3-targeting RNA guide sequence portion
gauucagggguuagcagguugg

SEQ ID NO: 6202 - RNA, 22 nt, Artificial Sequence
  C3-targeting RNA guide sequence portion
gauuccacaaacacccaaccca

SEQ ID NO: 6203 - RNA, 22 nt, Artificial Sequence
  C3-targeting RNA guide sequence portion
gauuggcuacuucggguucaug

SEQ ID NO: 6204 - RNA, 22 nt, Artificial Sequence
  C3-targeting RNA guide sequence portion
gauuguauuuauuaggacuggg

SEQ ID NO: 6205 - RNA, 22 nt, Artificial Sequence
  C3-targeting RNA guide sequence portion
gauugugggucuggaaguccag

SEQ ID NO: 6206 - RNA, 22 nt, Artificial Sequence
  C3-targeting RNA guide sequence portion
gauuugagguuuagagguuuug

SEQ ID NO: 6207 - RNA, 22 nt, Artificial Sequence
  C3-targeting RNA guide sequence portion
gauuugggaguuugcagcuugg

SEQ ID NO: 6208 - RNA, 22 nt, Artificial Sequence
  C3-targeting RNA guide sequence portion
gcaaacucccaaaucuuguaaa

SEQ ID NO: 6209 - RNA, 22 nt, Artificial Sequence
  C3-targeting RNA guide sequence portion
gcaacgagggggccacacaucc

SEQ ID NO: 6210 - RNA, 22 nt, Artificial Sequence
  C3-targeting RNA guide sequence portion
gcaacuccuccaagucucugga

SEQ ID NO: 6211 - RNA, 22 nt, Artificial Sequence
  C3-targeting RNA guide sequence portion
gcaaguccccaagcugcaaacu

SEQ ID NO: 6212 - RNA, 22 nt, Artificial Sequence
  C3-targeting RNA guide sequence portion
gcaagugcgccggcagucacug

SEQ ID NO: 6213 - RNA, 22 nt, Artificial Sequence
  C3-targeting RNA guide sequence portion
gcaauuuucaguguggguuuaa

SEQ ID NO: 6214 - RNA, 22 nt, Artificial Sequence
  C3-targeting RNA guide sequence portion
gcacacagccugccaggcgcug

SEQ ID NO: 6215 - RNA, 22 nt, Artificial Sequence
  C3-targeting RNA guide sequence portion
gcaccaucaaugaacaccacau

SEQ ID NO: 6216 - RNA, 22 nt, Artificial Sequence
  C3-targeting RNA guide sequence portion
gcaccccaaacccagccuaaac

SEQ ID NO: 6217 - RNA, 22 nt, Artificial Sequence
  C3-targeting RNA guide sequence portion
gcacccugaauucuacagggac

SEQ ID NO: 6218 - RNA, 22 nt, Artificial Sequence
  C3-targeting RNA guide sequence portion
gcacgggagugggcuugucauu

SEQ ID NO: 6219 - RNA, 22 nt, Artificial Sequence
  C3-targeting RNA guide sequence portion
gcacugccaccgucucaaccac

SEQ ID NO: 6220 - RNA, 22 nt, Artificial Sequence
  C3-targeting RNA guide sequence portion
gcacuugccaaugccauuaucu

SEQ ID NO: 6221 - RNA, 22 nt, Artificial Sequence
  C3-targeting RNA guide sequence portion
gcagacauuuggggguccaggu

SEQ ID NO: 6222 - RNA, 22 nt, Artificial Sequence
  C3-targeting RNA guide sequence portion
gcagccaccaugacucccacuc

SEQ ID NO: 6223 - RNA, 22 nt, Artificial Sequence
  C3-targeting RNA guide sequence portion
gcagcccaaauauauauaauca

SEQ ID NO: 6224 - RNA, 22 nt, Artificial Sequence
  C3-targeting RNA guide sequence portion
gcagcuuggggacuugcaauuu

SEQ ID NO: 6225 - RNA, 22 nt, Artificial Sequence
  C3-targeting RNA guide sequence portion
gcaggacagcagccaccaugac

SEQ ID NO: 6226 - RNA, 22 nt, Artificial Sequence
  C3-targeting RNA guide sequence portion
gcaggcugugugccccagccuc

SEQ ID NO: 6227 - RNA, 22 nt, Artificial Sequence
  C3-targeting RNA guide sequence portion
gcagguugggaaugauuauaua

SEQ ID NO: 6228 - RNA, 22 nt, Artificial Sequence
  C3-targeting RNA guide sequence portion
gcagucacuggauccucuccag

SEQ ID NO: 6229 - RNA, 22 nt, Artificial Sequence
  C3-targeting RNA guide sequence portion
gcagugcccagagaagauaaug

SEQ ID NO: 6230 - RNA, 22 nt, Artificial Sequence
  C3-targeting RNA guide sequence portion
gcauguguggguuuaggcgauu

SEQ ID NO: 6231 - RNA, 22 nt, Artificial Sequence
  C3-targeting RNA guide sequence portion
gcauuggcaagugcgccggcag

SEQ ID NO: 6232 - RNA, 22 nt, Artificial Sequence
  C3-targeting RNA guide sequence portion
gcauuuggguguuuguggauuc

SEQ ID NO: 6233 - RNA, 22 nt, Artificial Sequence
  C3-targeting RNA guide sequence portion
gccaaaaccucuaaaccucaaa

SEQ ID NO: 6234 - RNA, 22 nt, Artificial Sequence
  C3-targeting RNA guide sequence portion
gccaaucuuuaaacccacacug

SEQ ID NO: 6235 - RNA, 22 nt, Artificial Sequence
  C3-targeting RNA guide sequence portion
gccaaugccauuaucuucucug

SEQ ID NO: 6236 - RNA, 22 nt, Artificial Sequence
  C3-targeting RNA guide sequence portion
gccacacaucccaccaaacccu

SEQ ID NO: 6237 - RNA, 22 nt, Artificial Sequence
  C3-targeting RNA guide sequence portion
gccaccaugacucccacucuca

SEQ ID NO: 6238 - RNA, 22 nt, Artificial Sequence
  C3-targeting RNA guide sequence portion
gccaccgucucaaccacauggg

SEQ ID NO: 6239 - RNA, 22 nt, Artificial Sequence
  C3-targeting RNA guide sequence portion
gccagcugggccuggccuuuga

SEQ ID NO: 6240 - RNA, 22 nt, Artificial Sequence
  C3-targeting RNA guide sequence portion
gccaggcccagcuggcugagag

SEQ ID NO: 6241 - RNA, 22 nt, Artificial Sequence
  C3-targeting RNA guide sequence portion
gccaggcgcugacuccagugag

SEQ ID NO: 6242 - RNA, 22 nt, Artificial Sequence
  C3-targeting RNA guide sequence portion
gccaguccucacuggagucagc

SEQ ID NO: 6243 - RNA, 22 nt, Artificial Sequence
  C3-targeting RNA guide sequence portion
gccauuaucuucucugggcacu

SEQ ID NO: 6244 - RNA, 22 nt, Artificial Sequence
  C3-targeting RNA guide sequence portion
gcccaaauauauauaaucauuc

SEQ ID NO: 6245 - RNA, 22 nt, Artificial Sequence
  C3-targeting RNA guide sequence portion
gcccagagaagauaauggcauu

SEQ ID NO: 6246 - RNA, 22 nt, Artificial Sequence
  C3-targeting RNA guide sequence portion
gcccagcuggcugagaguggga

SEQ ID NO: 6247 - RNA, 22 nt, Artificial Sequence
  C3-targeting RNA guide sequence portion
gcccaggcuuucaaaggccagg

SEQ ID NO: 6248 - RNA, 22 nt, Artificial Sequence
  C3-targeting RNA guide sequence portion
gcccaugugguugagacggugg

SEQ ID NO: 6249 - RNA, 22 nt, Artificial Sequence
  C3-targeting RNA guide sequence portion
gccccaaacccuaaaccucuac

SEQ ID NO: 6250 - RNA, 22 nt, Artificial Sequence
  C3-targeting RNA guide sequence portion
gccccaacuauacaugaacccg

SEQ ID NO: 6251 - RNA, 22 nt, Artificial Sequence
  C3-targeting RNA guide sequence portion
gccccagccucugguccuggag

SEQ ID NO: 6252 - RNA, 22 nt, Artificial Sequence
  C3-targeting RNA guide sequence portion
gcccccucguugcccaggcuuu

SEQ ID NO: 6253 - RNA, 22 nt, Artificial Sequence
  C3-targeting RNA guide sequence portion
gcccuguuuguggguagaguca

SEQ ID NO: 6254 - RNA, 22 nt, Artificial Sequence
  C3-targeting RNA guide sequence portion
gccggcagucacuggauccucu

SEQ ID NO: 6255 - RNA, 22 nt, Artificial Sequence
  C3-targeting RNA guide sequence portion
gccggcgcacuugccaaugcca

SEQ ID NO: 6256 - RNA, 22 nt, Artificial Sequence
  C3-targeting RNA guide sequence portion
gccuaaacccacacaugcccca

SEQ ID NO: 6257 - RNA, 22 nt, Artificial Sequence
  C3-targeting RNA guide sequence portion
gccuaaaccuccaacaccccag

SEQ ID NO: 6258 - RNA, 22 nt, Artificial Sequence
  C3-targeting RNA guide sequence portion
gccucugguccuggagaggauc

SEQ ID NO: 6259 - RNA, 22 nt, Artificial Sequence
  C3-targeting RNA guide sequence portion
gccugagaguuuggguguuuau

SEQ ID NO: 6260 - RNA, 22 nt, Artificial Sequence
  C3-targeting RNA guide sequence portion
gccugccaggcgcugacuccag

SEQ ID NO: 6261 - RNA, 22 nt, Artificial Sequence
  C3-targeting RNA guide sequence portion
gccuggcaggcugugugcccca

SEQ ID NO: 6262 - RNA, 22 nt, Artificial Sequence
  C3-targeting RNA guide sequence portion
gccuggccuuugaaagccuggg

SEQ ID NO: 6263 - RNA, 22 nt, Artificial Sequence
  C3-targeting RNA guide sequence portion
gccugggcaacgagggggccac

SEQ ID NO: 6264 - RNA, 22 nt, Artificial Sequence
  C3-targeting RNA guide sequence portion
gccuuugaaagccugggcaacg

SEQ ID NO: 6265 - RNA, 22 nt, Artificial Sequence
  C3-targeting RNA guide sequence portion
gcgauugugggucuggaagucc

SEQ ID NO: 6266 - RNA, 22 nt, Artificial Sequence
  C3-targeting RNA guide sequence portion
gcgcacuugccaaugccauuau

SEQ ID NO: 6267 - RNA, 22 nt, Artificial Sequence
  C3-targeting RNA guide sequence portion
gcgccggcagucacuggauccu

SEQ ID NO: 6268 - RNA, 22 nt, Artificial Sequence
  C3-targeting RNA guide sequence portion
gcgccuggcaggcugugugccc

SEQ ID NO: 6269 - RNA, 22 nt, Artificial Sequence
  C3-targeting RNA guide sequence portion
gcgcugacuccagugaggacug

SEQ ID NO: 6270 - RNA, 22 nt, Artificial Sequence
  C3-targeting RNA guide sequence portion
gcguauguggguuuggguaggu

SEQ ID NO: 6271 - RNA, 22 nt, Artificial Sequence
  C3-targeting RNA guide sequence portion
gcgucagcaacuccuccaaguc

SEQ ID NO: 6272 - RNA, 22 nt, Artificial Sequence
  C3-targeting RNA guide sequence portion
gcgucucacauccguggaauga

SEQ ID NO: 6273 - RNA, 22 nt, Artificial Sequence
  C3-targeting RNA guide sequence portion
gcuaaccccugaauccacaaac

SEQ ID NO: 6274 - RNA, 22 nt, Artificial Sequence
  C3-targeting RNA guide sequence portion
gcuacuucggguucauguauag

SEQ ID NO: 6275 - RNA, 22 nt, Artificial Sequence
  C3-targeting RNA guide sequence portion
gcucuaagauuugagguuuaga

SEQ ID NO: 6276 - RNA, 22 nt, Artificial Sequence
  C3-targeting RNA guide sequence portion
gcugacgcugguuggaagguuc

SEQ ID NO: 6277 - RNA, 22 nt, Artificial Sequence
  C3-targeting RNA guide sequence portion
gcugacuccagugaggacuggc

SEQ ID NO: 6278 - RNA, 22 nt, Artificial Sequence
  C3-targeting RNA guide sequence portion
gcugagagugggagucauggug

SEQ ID NO: 6279 - RNA, 22 nt, Artificial Sequence
  C3-targeting RNA guide sequence portion
gcugcaaacucccaaaucuugu

SEQ ID NO: 6280 - RNA, 22 nt, Artificial Sequence
  C3-targeting RNA guide sequence portion
gcugccugagaguuuggguguu

SEQ ID NO: 6281 - RNA, 22 nt, Artificial Sequence
  C3-targeting RNA guide sequence portion
gcugcuguccugcccauguggu

SEQ ID NO: 6282 - RNA, 22 nt, Artificial Sequence
  C3-targeting RNA guide sequence portion
gcuggcugagagugggagucau

SEQ ID NO: 6283 - RNA, 22 nt, Artificial Sequence
  C3-targeting RNA guide sequence portion
gcugggccuggccuuugaaagc

SEQ ID NO: 6284 - RNA, 22 nt, Artificial Sequence
  C3-targeting RNA guide sequence portion
gcuggggcacacagccugccag

SEQ ID NO: 6285 - RNA, 22 nt, Artificial Sequence
  C3-targeting RNA guide sequence portion
gcuggguuuggggugcucuaag

SEQ ID NO: 6286 - RNA, 22 nt, Artificial Sequence
  C3-targeting RNA guide sequence portion
gcugguucugggguggaagcag

SEQ ID NO: 6287 - RNA, 22 nt, Artificial Sequence
  C3-targeting RNA guide sequence portion
gcugguuggaagguucaggguu

SEQ ID NO: 6288 - RNA, 22 nt, Artificial Sequence
  C3-targeting RNA guide sequence portion
gcuguccugcccaugugguuga

SEQ ID NO: 6289 - RNA, 22 nt, Artificial Sequence
  C3-targeting RNA guide sequence portion
gcugugugccccagccucuggu

SEQ ID NO: 6290 - RNA, 22 nt, Artificial Sequence
  C3-targeting RNA guide sequence portion
gcuuccaccccagaaccagccc

SEQ ID NO: 6291 - RNA, 22 nt, Artificial Sequence
  C3-targeting RNA guide sequence portion
gcuuggggacuugcaauuuuca

SEQ ID NO: 6292 - RNA, 22 nt, Artificial Sequence
  C3-targeting RNA guide sequence portion
gcuugucauuccacggauguga

SEQ ID NO: 6293 - RNA, 22 nt, Artificial Sequence
  C3-targeting RNA guide sequence portion
gcuuucaaaggccaggcccagc

SEQ ID NO: 6294 - RNA, 22 nt, Artificial Sequence
  C3-targeting RNA guide sequence portion
ggaagcagacauuugggggucc

SEQ ID NO: 6295 - RNA, 22 nt, Artificial Sequence
  C3-targeting RNA guide sequence portion
ggaagguucaggguuugguggg

SEQ ID NO: 6296 - RNA, 22 nt, Artificial Sequence
  C3-targeting RNA guide sequence portion
ggaaguccagagacuuggagga

SEQ ID NO: 6297 - RNA, 22 nt, Artificial Sequence
  C3-targeting RNA guide sequence portion
ggaauccagguaucauggaauu

SEQ ID NO: 6298 - RNA, 22 nt, Artificial Sequence
  C3-targeting RNA guide sequence portion
ggaauccagguaucguggaauu

SEQ ID NO: 6299 - RNA, 22 nt, Artificial Sequence
  C3-targeting RNA guide sequence portion
ggaauccagguaugguggaauu

SEQ ID NO: 6300 - RNA, 22 nt, Artificial Sequence
  C3-targeting RNA guide sequence portion
ggaaugacaagcccacucccgu

SEQ ID NO: 6301 - RNA, 22 nt, Artificial Sequence
  C3-targeting RNA guide sequence portion
ggaaugauuauauauauuuggg

SEQ ID NO: 6302 - RNA, 22 nt, Artificial Sequence
  C3-targeting RNA guide sequence portion
ggaauugauuguauuuauuagg

SEQ ID NO: 6303 - RNA, 22 nt, Artificial Sequence
  C3-targeting RNA guide sequence portion
ggaauuggaguuugggauguuu

SEQ ID NO: 6304 - RNA, 22 nt, Artificial Sequence
  C3-targeting RNA guide sequence portion
ggacacccucaacucuaccuac

SEQ ID NO: 6305 - RNA, 22 nt, Artificial Sequence
  C3-targeting RNA guide sequence portion
ggacagcagccaccaugacucc

SEQ ID NO: 6306 - RNA, 22 nt, Artificial Sequence
  C3-targeting RNA guide sequence portion
ggaccagaggcuggggcacaca

SEQ ID NO: 6307 - RNA, 22 nt, Artificial Sequence
  C3-targeting RNA guide sequence portion
ggacccccaaaugucugcuucc

SEQ ID NO: 6308 - RNA, 22 nt, Artificial Sequence
  C3-targeting RNA guide sequence portion
ggaccuggacccccaaaugucu

SEQ ID NO: 6309 - RNA, 22 nt, Artificial Sequence
  C3-targeting RNA guide sequence portion
ggacuggcgucucacauccgug

SEQ ID NO: 6310 - RNA, 22 nt, Artificial Sequence
  C3-targeting RNA guide sequence portion
ggacugggguguuggagguuua

SEQ ID NO: 6311 - RNA, 22 nt, Artificial Sequence
  C3-targeting RNA guide sequence portion
ggacuuccagacccacaaucgc

SEQ ID NO: 6312 - RNA, 22 nt, Artificial Sequence
  C3-targeting RNA guide sequence portion
ggacuugcaauuuucagugugg

SEQ ID NO: 6313 - RNA, 22 nt, Artificial Sequence
  C3-targeting RNA guide sequence portion
ggacuuuacaagauuugggagu

SEQ ID NO: 6314 - RNA, 22 nt, Artificial Sequence
  C3-targeting RNA guide sequence portion
ggagacucggagguuuggacuu

SEQ ID NO: 6315 - RNA, 22 nt, Artificial Sequence
  C3-targeting RNA guide sequence portion
ggagaggauccagugacugccg

SEQ ID NO: 6316 - RNA, 22 nt, Artificial Sequence
  C3-targeting RNA guide sequence portion
ggaggaguugcugacgcugguu

SEQ ID NO: 6317 - RNA, 22 nt, Artificial Sequence
  C3-targeting RNA guide sequence portion
ggagguuuaggcuggguuuggg

SEQ ID NO: 6318 - RNA, 22 nt, Artificial Sequence
  C3-targeting RNA guide sequence portion
ggagguuuggacuuuacaagau

SEQ ID NO: 6319 - RNA, 22 nt, Artificial Sequence
  C3-targeting RNA guide sequence portion
ggagucagcgccuggcaggcug

SEQ ID NO: 6320 - RNA, 22 nt, Artificial Sequence
  C3-targeting RNA guide sequence portion
ggagucaugguggcugcugucc

SEQ ID NO: 6321 - RNA, 22 nt, Artificial Sequence
  C3-targeting RNA guide sequence portion
ggagugggcuugucauuccacg

SEQ ID NO: 6322 - RNA, 22 nt, Artificial Sequence
  C3-targeting RNA guide sequence portion
ggaguggggcacgggagugggc

SEQ ID NO: 6323 - RNA, 22 nt, Artificial Sequence
  C3-targeting RNA guide sequence portion
ggaguguuuagagagguagagg

SEQ ID NO: 6324 - RNA, 22 nt, Artificial Sequence
  C3-targeting RNA guide sequence portion
ggaguugcugacgcugguugga

SEQ ID NO: 6325 - RNA, 22 nt, Artificial Sequence
  C3-targeting RNA guide sequence portion
ggaguuuauauacauuugggcu

SEQ ID NO: 6326 - RNA, 22 nt, Artificial Sequence
  C3-targeting RNA guide sequence portion
ggaguuugaguguuuacauauu

SEQ ID NO: 6327 - RNA, 22 nt, Artificial Sequence
  C3-targeting RNA guide sequence portion
ggaguuugcagcuuggggacuu

SEQ ID NO: 6328 - RNA, 22 nt, Artificial Sequence
  C3-targeting RNA guide sequence portion
ggaguuugggauguuucuagaa

SEQ ID NO: 6329 - RNA, 22 nt, Artificial Sequence
  C3-targeting RNA guide sequence portion
ggauccagugacugccggcgca

SEQ ID NO: 6330 - RNA, 22 nt, Artificial Sequence
  C3-targeting RNA guide sequence portion
ggauccucuccaggaccagagg

SEQ ID NO: 6331 - RNA, 22 nt, Artificial Sequence
  C3-targeting RNA guide sequence portion
ggaugugagacgccaguccuca

SEQ ID NO: 6332 - RNA, 22 nt, Artificial Sequence
  C3-targeting RNA guide sequence portion
ggauguguggcccccucguugc

SEQ ID NO: 6333 - RNA, 22 nt, Artificial Sequence
  C3-targeting RNA guide sequence portion
ggauguuucuagaauugagguc

SEQ ID NO: 6334 - RNA, 22 nt, Artificial Sequence
  C3-targeting RNA guide sequence portion
ggauucagggguuagcagguug

SEQ ID NO: 6335 - RNA, 22 nt, Artificial Sequence
  C3-targeting RNA guide sequence portion
ggauuccacaaacacccaaccc

SEQ ID NO: 6336 - RNA, 22 nt, Artificial Sequence
  C3-targeting RNA guide sequence portion
ggcaacgagggggccacacauc

SEQ ID NO: 6337 - RNA, 22 nt, Artificial Sequence
  C3-targeting RNA guide sequence portion
ggcaagugcgccggcagucacu

SEQ ID NO: 6338 - RNA, 22 nt, Artificial Sequence
  C3-targeting RNA guide sequence portion
ggcacacagccugccaggcgcu

SEQ ID NO: 6339 - RNA, 22 nt, Artificial Sequence
  C3-targeting RNA guide sequence portion
ggcacgggagugggcuugucau

SEQ ID NO: 6340 - RNA, 22 nt, Artificial Sequence
  C3-targeting RNA guide sequence portion
ggcacugccaccgucucaacca

SEQ ID NO: 6341 - RNA, 22 nt, Artificial Sequence
  C3-targeting RNA guide sequence portion
ggcagcccaaauauauauaauc

SEQ ID NO: 6342 - RNA, 22 nt, Artificial Sequence
  C3-targeting RNA guide sequence portion
ggcaggacagcagccaccauga

SEQ ID NO: 6343 - RNA, 22 nt, Artificial Sequence
  C3-targeting RNA guide sequence portion
ggcaggcugugugccccagccu

SEQ ID NO: 6344 - RNA, 22 nt, Artificial Sequence
  C3-targeting RNA guide sequence portion
ggcagucacuggauccucucca

SEQ ID NO: 6345 - RNA, 22 nt, Artificial Sequence
  C3-targeting RNA guide sequence portion
ggcagugcccagagaagauaau

SEQ ID NO: 6346 - RNA, 22 nt, Artificial Sequence
  C3-targeting RNA guide sequence portion
ggcauguguggguuuaggcgau

SEQ ID NO: 6347 - RNA, 22 nt, Artificial Sequence
  C3-targeting RNA guide sequence portion
ggcauuggcaagugcgccggca

SEQ ID NO: 6348 - RNA, 22 nt, Artificial Sequence
  C3-targeting RNA guide sequence portion
ggccacacaucccaccaaaccc

SEQ ID NO: 6349 - RNA, 22 nt, Artificial Sequence
  C3-targeting RNA guide sequence portion
ggccaggcccagcuggcugaga

SEQ ID NO: 6350 - RNA, 22 nt, Artificial Sequence
  C3-targeting RNA guide sequence portion
ggcccagcuggcugagaguggg

SEQ ID NO: 6351 - RNA, 22 nt, Artificial Sequence
  C3-targeting RNA guide sequence portion
ggcccccucguugcccaggcuu

SEQ ID NO: 6352 - RNA, 22 nt, Artificial Sequence
  C3-targeting RNA guide sequence portion
ggccuggccuuugaaagccugg

SEQ ID NO: 6353 - RNA, 22 nt, Artificial Sequence
  C3-targeting RNA guide sequence portion
ggccuuugaaagccugggcaac

SEQ ID NO: 6354 - RNA, 22 nt, Artificial Sequence
  C3-targeting RNA guide sequence portion
ggcgauugugggucuggaaguc

SEQ ID NO: 6355 - RNA, 22 nt, Artificial Sequence
  C3-targeting RNA guide sequence portion
ggcgcacuugccaaugccauua

SEQ ID NO: 6356 - RNA, 22 nt, Artificial Sequence
  C3-targeting RNA guide sequence portion
ggcgcugacuccagugaggacu

SEQ ID NO: 6357 - RNA, 22 nt, Artificial Sequence
  C3-targeting RNA guide sequence portion
ggcguauguggguuuggguagg

SEQ ID NO: 6358 - RNA, 22 nt, Artificial Sequence
  C3-targeting RNA guide sequence portion
ggcgucucacauccguggaaug

SEQ ID NO: 6359 - RNA, 22 nt, Artificial Sequence
  C3-targeting RNA guide sequence portion
ggcuacuucggguucauguaua

SEQ ID NO: 6360 - RNA, 22 nt, Artificial Sequence
  C3-targeting RNA guide sequence portion
ggcugagagugggagucauggu

SEQ ID NO: 6361 - RNA, 22 nt, Artificial Sequence
  C3-targeting RNA guide sequence portion
ggcugccugagaguuugggugu

SEQ ID NO: 6362 - RNA, 22 nt, Artificial Sequence
  C3-targeting RNA guide sequence portion
ggcugcuguccugcccaugugg

SEQ ID NO: 6363 - RNA, 22 nt, Artificial Sequence
  C3-targeting RNA guide sequence portion
ggcuggggcacacagccugcca

SEQ ID NO: 6364 - RNA, 22 nt, Artificial Sequence
  C3-targeting RNA guide sequence portion
ggcuggguuuggggugcucuaa

SEQ ID NO: 6365 - RNA, 22 nt, Artificial Sequence
  C3-targeting RNA guide sequence portion
ggcugguucugggguggaagca

SEQ ID NO: 6366 - RNA, 22 nt, Artificial Sequence
  C3-targeting RNA guide sequence portion
ggcugugugccccagccucugg

SEQ ID NO: 6367 - RNA, 22 nt, Artificial Sequence
  C3-targeting RNA guide sequence portion
ggcuugucauuccacggaugug

SEQ ID NO: 6368 - RNA, 22 nt, Artificial Sequence
  C3-targeting RNA guide sequence portion
ggcuuucaaaggccaggcccag

SEQ ID NO: 6369 - RNA, 22 nt, Artificial Sequence
  C3-targeting RNA guide sequence portion
gggaaugauuauauauauuugg

SEQ ID NO: 6370 - RNA, 22 nt, Artificial Sequence
  C3-targeting RNA guide sequence portion
gggaccuggacccccaaauguc

SEQ ID NO: 6371 - RNA, 22 nt, Artificial Sequence
  C3-targeting RNA guide sequence portion
gggacuugcaauuuucagugug

SEQ ID NO: 6372 - RNA, 22 nt, Artificial Sequence
  C3-targeting RNA guide sequence portion
gggagucaugguggcugcuguc

SEQ ID NO: 6373 - RNA, 22 nt, Artificial Sequence
  C3-targeting RNA guide sequence portion
gggagugggcuugucauuccac

SEQ ID NO: 6374 - RNA, 22 nt, Artificial Sequence
  C3-targeting RNA guide sequence portion
gggaguuugaguguuuacauau

SEQ ID NO: 6375 - RNA, 22 nt, Artificial Sequence
  C3-targeting RNA guide sequence portion
gggaguuugcagcuuggggacu

SEQ ID NO: 6376 - RNA, 22 nt, Artificial Sequence
  C3-targeting RNA guide sequence portion
gggauguguggcccccucguug

SEQ ID NO: 6377 - RNA, 22 nt, Artificial Sequence
  C3-targeting RNA guide sequence portion
gggauguuucuagaauugaggu

SEQ ID NO: 6378 - RNA, 22 nt, Artificial Sequence
  C3-targeting RNA guide sequence portion
gggcaacgagggggccacacau

SEQ ID NO: 6379 - RNA, 22 nt, Artificial Sequence
  C3-targeting RNA guide sequence portion
gggcacacagccugccaggcgc

SEQ ID NO: 6380 - RNA, 22 nt, Artificial Sequence
  C3-targeting RNA guide sequence portion
gggcacgggagugggcuuguca

SEQ ID NO: 6381 - RNA, 22 nt, Artificial Sequence
  C3-targeting RNA guide sequence portion
gggcacugccaccgucucaacc

SEQ ID NO: 6382 - RNA, 22 nt, Artificial Sequence
  C3-targeting RNA guide sequence portion
gggcaggacagcagccaccaug

SEQ ID NO: 6383 - RNA, 22 nt, Artificial Sequence
  C3-targeting RNA guide sequence portion
gggcauguguggguuuaggcga

SEQ ID NO: 6384 - RNA, 22 nt, Artificial Sequence
  C3-targeting RNA guide sequence portion
gggccacacaucccaccaaacc

SEQ ID NO: 6385 - RNA, 22 nt, Artificial Sequence
  C3-targeting RNA guide sequence portion
gggccuggccuuugaaagccug

SEQ ID NO: 6386 - RNA, 22 nt, Artificial Sequence
  C3-targeting RNA guide sequence portion
gggcugccugagaguuugggug

SEQ ID NO: 6387 - RNA, 22 nt, Artificial Sequence
  C3-targeting RNA guide sequence portion
gggcugguucugggguggaagc

SEQ ID NO: 6388 - RNA, 22 nt, Artificial Sequence
  C3-targeting RNA guide sequence portion
gggcuugucauuccacggaugu

SEQ ID NO: 6389 - RNA, 22 nt, Artificial Sequence
  C3-targeting RNA guide sequence portion
ggggacuugcaauuuucagugu

SEQ ID NO: 6390 - RNA, 22 nt, Artificial Sequence
  C3-targeting RNA guide sequence portion
ggggcacacagccugccaggcg

SEQ ID NO: 6391 - RNA, 22 nt, Artificial Sequence
  C3-targeting RNA guide sequence portion
ggggcacgggagugggcuuguc

SEQ ID NO: 6392 - RNA, 22 nt, Artificial Sequence
  C3-targeting RNA guide sequence portion
ggggcauguguggguuuaggcg

SEQ ID NO: 6393 - RNA, 22 nt, Artificial Sequence
  C3-targeting RNA guide sequence portion
ggggcauuuggaauugauugua

SEQ ID NO: 6394 - RNA, 22 nt, Artificial Sequence
  C3-targeting RNA guide sequence portion
ggggccacacaucccaccaaac

SEQ ID NO: 6395 - RNA, 22 nt, Artificial Sequence
  C3-targeting RNA guide sequence portion
gggggccacacaucccaccaaa

SEQ ID NO: 6396 - RNA, 22 nt, Artificial Sequence
  C3-targeting RNA guide sequence portion
ggggguccaggucccuguagaa

SEQ ID NO: 6397 - RNA, 22 nt, Artificial Sequence
  C3-targeting RNA guide sequence portion
gggguccaggucccuguagaau

SEQ ID NO: 6398 - RNA, 22 nt, Artificial Sequence
  C3-targeting RNA guide sequence portion
ggggugcucuaagauuugaggu

SEQ ID NO: 6399 - RNA, 22 nt, Artificial Sequence
  C3-targeting RNA guide sequence portion
gggguggaagcagacauuuggg

SEQ ID NO: 6400 - RNA, 22 nt, Artificial Sequence
  C3-targeting RNA guide sequence portion
gggguguuggagguuuaggcug

SEQ ID NO: 6401 - RNA, 22 nt, Artificial Sequence
  C3-targeting RNA guide sequence portion
gggguuagcagguugggaauga

SEQ ID NO: 6402 - RNA, 22 nt, Artificial Sequence
  C3-targeting RNA guide sequence portion
ggguagguagaguugagggugu

SEQ ID NO: 6403 - RNA, 22 nt, Artificial Sequence
  C3-targeting RNA guide sequence portion
ggguccaggucccuguagaauu

SEQ ID NO: 6404 - RNA, 22 nt, Artificial Sequence
  C3-targeting RNA guide sequence portion
gggucuggaaguccagagacuu

SEQ ID NO: 6405 - RNA, 22 nt, Artificial Sequence
  C3-targeting RNA guide sequence portion
gggugcauuuggguguuugugg

SEQ ID NO: 6406 - RNA, 22 nt, Artificial Sequence
  C3-targeting RNA guide sequence portion
gggugcucuaagauuugagguu

SEQ ID NO: 6407 - RNA, 22 nt, Artificial Sequence
  C3-targeting RNA guide sequence portion
ggguggaagcagacauuugggg

SEQ ID NO: 6408 - RNA, 22 nt, Artificial Sequence
  C3-targeting RNA guide sequence portion
ggguguaugugguguucauuga

SEQ ID NO: 6409 - RNA, 22 nt, Artificial Sequence
  C3-targeting RNA guide sequence portion
ggguguccgggaguuugagugu

SEQ ID NO: 6410 - RNA, 22 nt, Artificial Sequence
  C3-targeting RNA guide sequence portion
ggguguuggagguuuaggcugg

SEQ ID NO: 6411 - RNA, 22 nt, Artificial Sequence
  C3-targeting RNA guide sequence portion
ggguguuuauggguuggguguu

SEQ ID NO: 6412 - RNA, 22 nt, Artificial Sequence
  C3-targeting RNA guide sequence portion
ggguguuuguggaauccaggua

SEQ ID NO: 6413 - RNA, 22 nt, Artificial Sequence
  C3-targeting RNA guide sequence portion
ggguguuuguggauucaggggu

SEQ ID NO: 6414 - RNA, 22 nt, Artificial Sequence
  C3-targeting RNA guide sequence portion
ggguuagcagguugggaaugau

SEQ ID NO: 6415 - RNA, 22 nt, Artificial Sequence
  C3-targeting RNA guide sequence portion
ggguucauguauaguuggggca

SEQ ID NO: 6416 - RNA, 22 nt, Artificial Sequence
  C3-targeting RNA guide sequence portion
ggguuggguguuuguggaaucc

SEQ ID NO: 6417 - RNA, 22 nt, Artificial Sequence
  C3-targeting RNA guide sequence portion
ggguuuaaagauuggcuacuuc

SEQ ID NO: 6418 - RNA, 22 nt, Artificial Sequence
  C3-targeting RNA guide sequence portion
ggguuuaggcgauugugggucu

SEQ ID NO: 6419 - RNA, 22 nt, Artificial Sequence
  C3-targeting RNA guide sequence portion
ggguuuggggcauguguggguu

SEQ ID NO: 6420 - RNA, 22 nt, Artificial Sequence
  C3-targeting RNA guide sequence portion
ggguuuggggugcucuaagauu

SEQ ID NO: 6421 - RNA, 22 nt, Artificial Sequence
  C3-targeting RNA guide sequence portion
ggguuuggguagguagaguuga

SEQ ID NO: 6422 - RNA, 22 nt, Artificial Sequence
  C3-targeting RNA guide sequence portion
ggguuuggugggauguguggcc

SEQ ID NO: 6423 - RNA, 22 nt, Artificial Sequence
  C3-targeting RNA guide sequence portion
gguagagguuuaggguuugggg

SEQ ID NO: 6424 - RNA, 22 nt, Artificial Sequence
  C3-targeting RNA guide sequence portion
gguagaguugaggguguccggg

SEQ ID NO: 6425 - RNA, 22 nt, Artificial Sequence
  C3-targeting RNA guide sequence portion
gguagguagaguugaggguguc

SEQ ID NO: 6426 - RNA, 22 nt, Artificial Sequence
  C3-targeting RNA guide sequence portion
gguaucauggaauuggaguuua

SEQ ID NO: 6427 - RNA, 22 nt, Artificial Sequence
  C3-targeting RNA guide sequence portion
gguaucguggaauuggaguuua

SEQ ID NO: 6428 - RNA, 22 nt, Artificial Sequence
  C3-targeting RNA guide sequence portion
gguaugguggaauuggaguuug

SEQ ID NO: 6429 - RNA, 22 nt, Artificial Sequence
  C3-targeting RNA guide sequence portion
ggucaucuguugguuuagggug

SEQ ID NO: 6430 - RNA, 22 nt, Artificial Sequence
  C3-targeting RNA guide sequence portion
gguccaggucccuguagaauuc

SEQ ID NO: 6431 - RNA, 22 nt, Artificial Sequence
  C3-targeting RNA guide sequence portion
ggucccuguagaauucagggug

SEQ ID NO: 6432 - RNA, 22 nt, Artificial Sequence
  C3-targeting RNA guide sequence portion
gguccuggagaggauccaguga

SEQ ID NO: 6433 - RNA, 22 nt, Artificial Sequence
  C3-targeting RNA guide sequence portion
ggucuggaaguccagagacuug

SEQ ID NO: 6434 - RNA, 22 nt, Artificial Sequence
  C3-targeting RNA guide sequence portion
ggugcauuuggguguuugugga

SEQ ID NO: 6435 - RNA, 22 nt, Artificial Sequence
  C3-targeting RNA guide sequence portion
ggugcucuaagauuugagguuu

SEQ ID NO: 6436 - RNA, 22 nt, Artificial Sequence
  C3-targeting RNA guide sequence portion
gguggaagcagacauuuggggg

SEQ ID NO: 6437 - RNA, 22 nt, Artificial Sequence
  C3-targeting RNA guide sequence portion
gguggaauuggaguuugggaug

SEQ ID NO: 6438 - RNA, 22 nt, Artificial Sequence
  C3-targeting RNA guide sequence portion
gguggcagugcccagagaagau

SEQ ID NO: 6439 - RNA, 22 nt, Artificial Sequence
  C3-targeting RNA guide sequence portion
gguggcugcuguccugcccaug

SEQ ID NO: 6440 - RNA, 22 nt, Artificial Sequence
  C3-targeting RNA guide sequence portion
ggugggauguguggcccccucg

SEQ ID NO: 6441 - RNA, 22 nt, Artificial Sequence
  C3-targeting RNA guide sequence portion
gguguaugugguguucauugau

SEQ ID NO: 6442 - RNA, 22 nt, Artificial Sequence
  C3-targeting RNA guide sequence portion
gguguccgggaguuugaguguu

SEQ ID NO: 6443 - RNA, 22 nt, Artificial Sequence
  C3-targeting RNA guide sequence portion
gguguuggagguuuaggcuggg

SEQ ID NO: 6444 - RNA, 22 nt, Artificial Sequence
  C3-targeting RNA guide sequence portion
gguguuuauggguuggguguuu

SEQ ID NO: 6445 - RNA, 22 nt, Artificial Sequence
  C3-targeting RNA guide sequence portion
gguguuuguggaauccagguau

SEQ ID NO: 6446 - RNA, 22 nt, Artificial Sequence
  C3-targeting RNA guide sequence portion
gguguuuguggauucagggguu

SEQ ID NO: 6447 - RNA, 22 nt, Artificial Sequence
  C3-targeting RNA guide sequence portion
gguuagcagguugggaaugauu

SEQ ID NO: 6448 - RNA, 22 nt, Artificial Sequence
  C3-targeting RNA guide sequence portion
gguuaugacucuacccacaaac

SEQ ID NO: 6449 - RNA, 22 nt, Artificial Sequence
  C3-targeting RNA guide sequence portion
gguucaggguuuggugggaugu

SEQ ID NO: 6450 - RNA, 22 nt, Artificial Sequence
  C3-targeting RNA guide sequence portion
gguucauguauaguuggggcau

SEQ ID NO: 6451 - RNA, 22 nt, Artificial Sequence
  C3-targeting RNA guide sequence portion
gguucugggguggaagcagaca

SEQ ID NO: 6452 - RNA, 22 nt, Artificial Sequence
  C3-targeting RNA guide sequence portion
gguugagacgguggcagugccc

SEQ ID NO: 6453 - RNA, 22 nt, Artificial Sequence
  C3-targeting RNA guide sequence portion
gguuggaagguucaggguuugg

SEQ ID NO: 6454 - RNA, 22 nt, Artificial Sequence
  C3-targeting RNA guide sequence portion
gguugggaaugauuauauauau

SEQ ID NO: 6455 - RNA, 22 nt, Artificial Sequence
  C3-targeting RNA guide sequence portion
gguuggguguuuguggaaucca

SEQ ID NO: 6456 - RNA, 22 nt, Artificial Sequence
  C3-targeting RNA guide sequence portion
gguuuaaagauuggcuacuucg

SEQ ID NO: 6457 - RNA, 22 nt, Artificial Sequence
  C3-targeting RNA guide sequence portion
gguuuagagguuuuggcguaug

SEQ ID NO: 6458 - RNA, 22 nt, Artificial Sequence
  C3-targeting RNA guide sequence portion
gguuuaggcgauugugggucug

SEQ ID NO: 6459 - RNA, 22 nt, Artificial Sequence
  C3-targeting RNA guide sequence portion
gguuuaggcuggguuuggggug

SEQ ID NO: 6460 - RNA, 22 nt, Artificial Sequence
  C3-targeting RNA guide sequence portion
gguuuaggguguaugugguguu

SEQ ID NO: 6461 - RNA, 22 nt, Artificial Sequence
  C3-targeting RNA guide sequence portion
gguuuaggguuuggggcaugug

SEQ ID NO: 6462 - RNA, 22 nt, Artificial Sequence
  C3-targeting RNA guide sequence portion
gguuuggacuuuacaagauuug

SEQ ID NO: 6463 - RNA, 22 nt, Artificial Sequence
  C3-targeting RNA guide sequence portion
gguuuggggcauguguggguuu

SEQ ID NO: 6464 - RNA, 22 nt, Artificial Sequence
  C3-targeting RNA guide sequence portion
gguuuggggugcucuaagauuu

SEQ ID NO: 6465 - RNA, 22 nt, Artificial Sequence
  C3-targeting RNA guide sequence portion
gguuuggguagguagaguugag

SEQ ID NO: 6466 - RNA, 22 nt, Artificial Sequence
  C3-targeting RNA guide sequence portion
gguuuggugggauguguggccc

SEQ ID NO: 6467 - RNA, 22 nt, Artificial Sequence
  C3-targeting RNA guide sequence portion
gguuuuggcguauguggguuug

SEQ ID NO: 6468 - RNA, 22 nt, Artificial Sequence
  C3-targeting RNA guide sequence portion
guaaacacucaaacucccggac

SEQ ID NO: 6469 - RNA, 22 nt, Artificial Sequence
  C3-targeting RNA guide sequence portion
guagaauucagggugcauuugg

SEQ ID NO: 6470 - RNA, 22 nt, Artificial Sequence
  C3-targeting RNA guide sequence portion
guagagguuuaggguuuggggc

SEQ ID NO: 6471 - RNA, 22 nt, Artificial Sequence
  C3-targeting RNA guide sequence portion
guagaguugaggguguccggga

SEQ ID NO: 6472 - RNA, 22 nt, Artificial Sequence
  C3-targeting RNA guide sequence portion
guagccaaucuuuaaacccaca

SEQ ID NO: 6473 - RNA, 22 nt, Artificial Sequence
  C3-targeting RNA guide sequence portion
guagguagaguugagggugucc

SEQ ID NO: 6474 - RNA, 22 nt, Artificial Sequence
  C3-targeting RNA guide sequence portion
guauaguuggggcauuuggaau

SEQ ID NO: 6475 - RNA, 22 nt, Artificial Sequence
  C3-targeting RNA guide sequence portion
guauauaaacuccaauuccacg

SEQ ID NO: 6476 - RNA, 22 nt, Artificial Sequence
  C3-targeting RNA guide sequence portion
guauauaaacuccaauuccaug

SEQ ID NO: 6477 - RNA, 22 nt, Artificial Sequence
  C3-targeting RNA guide sequence portion
guaucguggaauuggaguuuau

SEQ ID NO: 6478 - RNA, 22 nt, Artificial Sequence
  C3-targeting RNA guide sequence portion
guaugguggaauuggaguuugg

SEQ ID NO: 6479 - RNA, 22 nt, Artificial Sequence
  C3-targeting RNA guide sequence portion
guauguggguuuggguagguag

SEQ ID NO: 6480 - RNA, 22 nt, Artificial Sequence
  C3-targeting RNA guide sequence portion
guaugugguguucauugauggu

SEQ ID NO: 6481 - RNA, 22 nt, Artificial Sequence
  C3-targeting RNA guide sequence portion
guauuuauuaggacuggggugu

SEQ ID NO: 6482 - RNA, 22 nt, Artificial Sequence
  C3-targeting RNA guide sequence portion
gucacuggauccucuccaggac

SEQ ID NO: 6483 - RNA, 22 nt, Artificial Sequence
  C3-targeting RNA guide sequence portion
gucagcaacuccuccaagucuc

SEQ ID NO: 6484 - RNA, 22 nt, Artificial Sequence
  C3-targeting RNA guide sequence portion
gucagcgccuggcaggcugugu

SEQ ID NO: 6485 - RNA, 22 nt, Artificial Sequence
  C3-targeting RNA guide sequence portion
gucaucuguugguuuagggugu

SEQ ID NO: 6486 - RNA, 22 nt, Artificial Sequence
  C3-targeting RNA guide sequence portion
gucaugguggcugcuguccugc

SEQ ID NO: 6487 - RNA, 22 nt, Artificial Sequence
  C3-targeting RNA guide sequence portion
gucauuccacggaugugagacg

SEQ ID NO: 6488 - RNA, 22 nt, Artificial Sequence
  C3-targeting RNA guide sequence portion
guccagagacuuggaggaguug

SEQ ID NO: 6489 - RNA, 22 nt, Artificial Sequence
  C3-targeting RNA guide sequence portion
guccaggucccuguagaauuca

SEQ ID NO: 6490 - RNA, 22 nt, Artificial Sequence
  C3-targeting RNA guide sequence portion
guccccaagcugcaaacuccca

SEQ ID NO: 6491 - RNA, 22 nt, Artificial Sequence
  C3-targeting RNA guide sequence portion
gucccuguagaauucagggugc

SEQ ID NO: 6492 - RNA, 22 nt, Artificial Sequence
  C3-targeting RNA guide sequence portion
guccgggaguuugaguguuuac

SEQ ID NO: 6493 - RNA, 22 nt, Artificial Sequence
  C3-targeting RNA guide sequence portion
guccucacuggagucagcgccu

SEQ ID NO: 6494 - RNA, 22 nt, Artificial Sequence
  C3-targeting RNA guide sequence portion
guccugcccaugugguugagac

SEQ ID NO: 6495 - RNA, 22 nt, Artificial Sequence
  C3-targeting RNA guide sequence portion
guccuggagaggauccagugac

SEQ ID NO: 6496 - RNA, 22 nt, Artificial Sequence
  C3-targeting RNA guide sequence portion
gucggaguggggcacgggagug

SEQ ID NO: 6497 - RNA, 22 nt, Artificial Sequence
  C3-targeting RNA guide sequence portion
gucucaaccacaugggcaggac

SEQ ID NO: 6498 - RNA, 22 nt, Artificial Sequence
  C3-targeting RNA guide sequence portion
gucucacauccguggaaugaca

SEQ ID NO: 6499 - RNA, 22 nt, Artificial Sequence
  C3-targeting RNA guide sequence portion
gucucuggacuuccagacccac

SEQ ID NO: 6500 - RNA, 22 nt, Artificial Sequence
  C3-targeting RNA guide sequence portion
gucugcuuccaccccagaacca

SEQ ID NO: 6501 - RNA, 22 nt, Artificial Sequence
  C3-targeting RNA guide sequence portion
gucuggaaguccagagacuugg

SEQ ID NO: 6502 - RNA, 22 nt, Artificial Sequence
  C3-targeting RNA guide sequence portion
gugacugccggcgcacuugcca

SEQ ID NO: 6503 - RNA, 22 nt, Artificial Sequence
  C3-targeting RNA guide sequence portion
gugagacgccaguccucacugg

SEQ ID NO: 6504 - RNA, 22 nt, Artificial Sequence
  C3-targeting RNA guide sequence portion
gugaggacuggcgucucacauc

SEQ ID NO: 6505 - RNA, 22 nt, Artificial Sequence
  C3-targeting RNA guide sequence portion
gugagugguuaugacucuaccc

SEQ ID NO: 6506 - RNA, 22 nt, Artificial Sequence
  C3-targeting RNA guide sequence portion
gugcauuuggguguuuguggau

SEQ ID NO: 6507 - RNA, 22 nt, Artificial Sequence
  C3-targeting RNA guide sequence portion
gugcccagagaagauaauggca

SEQ ID NO: 6508 - RNA, 22 nt, Artificial Sequence
  C3-targeting RNA guide sequence portion
gugccccagccucugguccugg

SEQ ID NO: 6509 - RNA, 22 nt, Artificial Sequence
  C3-targeting RNA guide sequence portion
gugcgccggcagucacuggauc

SEQ ID NO: 6510 - RNA, 22 nt, Artificial Sequence
  C3-targeting RNA guide sequence portion
gugcucuaagauuugagguuua

SEQ ID NO: 6511 - RNA, 22 nt, Artificial Sequence
  C3-targeting RNA guide sequence portion
guggaagcagacauuugggggu

SEQ ID NO: 6512 - RNA, 22 nt, Artificial Sequence
  C3-targeting RNA guide sequence portion
guggaauccagguaucauggaa

SEQ ID NO: 6513 - RNA, 22 nt, Artificial Sequence
  C3-targeting RNA guide sequence portion
guggaauccagguaucguggaa

SEQ ID NO: 6514 - RNA, 22 nt, Artificial Sequence
  C3-targeting RNA guide sequence portion
guggaauccagguaugguggaa

SEQ ID NO: 6515 - RNA, 22 nt, Artificial Sequence
  C3-targeting RNA guide sequence portion
guggaaugacaagcccacuccc

SEQ ID NO: 6516 - RNA, 22 nt, Artificial Sequence
  C3-targeting RNA guide sequence portion
guggaauuggaguuuauauaca

SEQ ID NO: 6517 - RNA, 22 nt, Artificial Sequence
  C3-targeting RNA guide sequence portion
guggaauuggaguuugggaugu

SEQ ID NO: 6518 - RNA, 22 nt, Artificial Sequence
  C3-targeting RNA guide sequence portion
guggauucagggguuagcaggu

SEQ ID NO: 6519 - RNA, 22 nt, Artificial Sequence
  C3-targeting RNA guide sequence portion
guggcagugcccagagaagaua

SEQ ID NO: 6520 - RNA, 22 nt, Artificial Sequence
  C3-targeting RNA guide sequence portion
guggcccccucguugcccaggc

SEQ ID NO: 6521 - RNA, 22 nt, Artificial Sequence
  C3-targeting RNA guide sequence portion
guggcugcuguccugcccaugu

SEQ ID NO: 6522 - RNA, 22 nt, Artificial Sequence
  C3-targeting RNA guide sequence portion
gugggagucaugguggcugcug

SEQ ID NO: 6523 - RNA, 22 nt, Artificial Sequence
  C3-targeting RNA guide sequence portion
gugggauguguggcccccucgu

SEQ ID NO: 6524 - RNA, 22 nt, Artificial Sequence
  C3-targeting RNA guide sequence portion
gugggcuugucauuccacggau

SEQ ID NO: 6525 - RNA, 22 nt, Artificial Sequence
  C3-targeting RNA guide sequence portion
guggggcacgggagugggcuug

SEQ ID NO: 6526 - RNA, 22 nt, Artificial Sequence
  C3-targeting RNA guide sequence portion
gugggucuggaaguccagagac

SEQ ID NO: 6527 - RNA, 22 nt, Artificial Sequence
  C3-targeting RNA guide sequence portion
guggguuuaaagauuggcuacu

SEQ ID NO: 6528 - RNA, 22 nt, Artificial Sequence
  C3-targeting RNA guide sequence portion
guggguuuaggcgauugugggu

SEQ ID NO: 6529 - RNA, 22 nt, Artificial Sequence
  C3-targeting RNA guide sequence portion
guggguuuggguagguagaguu

SEQ ID NO: 6530 - RNA, 22 nt, Artificial Sequence
  C3-targeting RNA guide sequence portion
gugguguucauugauggugcgg

SEQ ID NO: 6531 - RNA, 22 nt, Artificial Sequence
  C3-targeting RNA guide sequence portion
gugguuaugacucuacccacaa

SEQ ID NO: 6532 - RNA, 22 nt, Artificial Sequence
  C3-targeting RNA guide sequence portion
gugguugagacgguggcagugc

SEQ ID NO: 6533 - RNA, 22 nt, Artificial Sequence
  C3-targeting RNA guide sequence portion
guguaugugguguucauugaug

SEQ ID NO: 6534 - RNA, 22 nt, Artificial Sequence
  C3-targeting RNA guide sequence portion
guguccgggaguuugaguguuu

SEQ ID NO: 6535 - RNA, 22 nt, Artificial Sequence
  C3-targeting RNA guide sequence portion
gugugccccagccucugguccu

SEQ ID NO: 6536 - RNA, 22 nt, Artificial Sequence
  C3-targeting RNA guide sequence portion
guguggcccccucguugcccag

SEQ ID NO: 6537 - RNA, 22 nt, Artificial Sequence
  C3-targeting RNA guide sequence portion
guguggguuuaaagauuggcua

SEQ ID NO: 6538 - RNA, 22 nt, Artificial Sequence
  C3-targeting RNA guide sequence portion
guguggguuuaggcgauugugg

SEQ ID NO: 6539 - RNA, 22 nt, Artificial Sequence
  C3-targeting RNA guide sequence portion
guguuggagguuuaggcugggu

SEQ ID NO: 6540 - RNA, 22 nt, Artificial Sequence
  C3-targeting RNA guide sequence portion
guguuuacauauuuggaguguu

SEQ ID NO: 6541 - RNA, 22 nt, Artificial Sequence
  C3-targeting RNA guide sequence portion
guguuuagagagguagagguuu

SEQ ID NO: 6542 - RNA, 22 nt, Artificial Sequence
  C3-targeting RNA guide sequence portion
guguuuauggguuggguguuug

SEQ ID NO: 6543 - RNA, 22 nt, Artificial Sequence
  C3-targeting RNA guide sequence portion
guguuuguggaauccagguauc

SEQ ID NO: 6544 - RNA, 22 nt, Artificial Sequence
  C3-targeting RNA guide sequence portion
guguuuguggaauccagguaug

SEQ ID NO: 6545 - RNA, 22 nt, Artificial Sequence
  C3-targeting RNA guide sequence portion
guguuuguggauucagggguua

SEQ ID NO: 6546 - RNA, 22 nt, Artificial Sequence
  C3-targeting RNA guide sequence portion
guuagcagguugggaaugauua

SEQ ID NO: 6547 - RNA, 22 nt, Artificial Sequence
  C3-targeting RNA guide sequence portion
guuaugacucuacccacaaaca

SEQ ID NO: 6548 - RNA, 22 nt, Artificial Sequence
  C3-targeting RNA guide sequence portion
guucaggguuuggugggaugug

SEQ ID NO: 6549 - RNA, 22 nt, Artificial Sequence
  C3-targeting RNA guide sequence portion
guucauguauaguuggggcauu

SEQ ID NO: 6550 - RNA, 22 nt, Artificial Sequence
  C3-targeting RNA guide sequence portion
guucugggguggaagcagacau

SEQ ID NO: 6551 - RNA, 22 nt, Artificial Sequence
  C3-targeting RNA guide sequence portion
guugagacgguggcagugccca

SEQ ID NO: 6552 - RNA, 22 nt, Artificial Sequence
  C3-targeting RNA guide sequence portion
guugaggguguccgggaguuug

SEQ ID NO: 6553 - RNA, 22 nt, Artificial Sequence
  C3-targeting RNA guide sequence portion
guugcccaggcuuucaaaggcc

SEQ ID NO: 6554 - RNA, 22 nt, Artificial Sequence
  C3-targeting RNA guide sequence portion
guugcugacgcugguuggaagg

SEQ ID NO: 6555 - RNA, 22 nt, Artificial Sequence
  C3-targeting RNA guide sequence portion
guuggaagguucaggguuuggu

SEQ ID NO: 6556 - RNA, 22 nt, Artificial Sequence
  C3-targeting RNA guide sequence portion
guuggagguuuaggcuggguuu

SEQ ID NO: 6557 - RNA, 22 nt, Artificial Sequence
  C3-targeting RNA guide sequence portion
guugggaaugauuauauauauu

SEQ ID NO: 6558 - RNA, 22 nt, Artificial Sequence
  C3-targeting RNA guide sequence portion
guuggggcauuuggaauugauu

SEQ ID NO: 6559 - RNA, 22 nt, Artificial Sequence
  C3-targeting RNA guide sequence portion
guuggguguuuguggaauccag

SEQ ID NO: 6560 - RNA, 22 nt, Artificial Sequence
  C3-targeting RNA guide sequence portion
guugguuuaggguguauguggu

SEQ ID NO: 6561 - RNA, 22 nt, Artificial Sequence
  C3-targeting RNA guide sequence portion
guuuaaagauuggcuacuucgg

SEQ ID NO: 6562 - RNA, 22 nt, Artificial Sequence
  C3-targeting RNA guide sequence portion
guuuacauauuuggaguguuua

SEQ ID NO: 6563 - RNA, 22 nt, Artificial Sequence
  C3-targeting RNA guide sequence portion
guuuagagagguagagguuuag

SEQ ID NO: 6564 - RNA, 22 nt, Artificial Sequence
  C3-targeting RNA guide sequence portion
guuuagagguuuuggcguaugu

SEQ ID NO: 6565 - RNA, 22 nt, Artificial Sequence
  C3-targeting RNA guide sequence portion
guuuaggcgauugugggucugg

SEQ ID NO: 6566 - RNA, 22 nt, Artificial Sequence
  C3-targeting RNA guide sequence portion
guuuaggcuggguuuggggugc

SEQ ID NO: 6567 - RNA, 22 nt, Artificial Sequence
  C3-targeting RNA guide sequence portion
guuuaggguguaugugguguuc

SEQ ID NO: 6568 - RNA, 22 nt, Artificial Sequence
  C3-targeting RNA guide sequence portion
guuuaggguuuggggcaugugu

SEQ ID NO: 6569 - RNA, 22 nt, Artificial Sequence
  C3-targeting RNA guide sequence portion
guuuauauacauuugggcugcc

SEQ ID NO: 6570 - RNA, 22 nt, Artificial Sequence
  C3-targeting RNA guide sequence portion
guuuauggguuggguguuugug

SEQ ID NO: 6571 - RNA, 22 nt, Artificial Sequence
  C3-targeting RNA guide sequence portion
guuucuagaauugaggucaucu

SEQ ID NO: 6572 - RNA, 22 nt, Artificial Sequence
  C3-targeting RNA guide sequence portion
guuugaguguuuacauauuugg

SEQ ID NO: 6573 - RNA, 22 nt, Artificial Sequence
  C3-targeting RNA guide sequence portion
guuugcagcuuggggacuugca

SEQ ID NO: 6574 - RNA, 22 nt, Artificial Sequence
  C3-targeting RNA guide sequence portion
guuuggacuuuacaagauuugg

SEQ ID NO: 6575 - RNA, 22 nt, Artificial Sequence
  C3-targeting RNA guide sequence portion
guuugggauguuucuagaauug

SEQ ID NO: 6576 - RNA, 22 nt, Artificial Sequence
  C3-targeting RNA guide sequence portion
guuuggggcauguguggguuua

SEQ ID NO: 6577 - RNA, 22 nt, Artificial Sequence
  C3-targeting RNA guide sequence portion
guuuggggugcucuaagauuug

SEQ ID NO: 6578 - RNA, 22 nt, Artificial Sequence
  C3-targeting RNA guide sequence portion
guuuggguagguagaguugagg

SEQ ID NO: 6579 - RNA, 22 nt, Artificial Sequence
  C3-targeting RNA guide sequence portion
guuuggguguuuauggguuggg

SEQ ID NO: 6580 - RNA, 22 nt, Artificial Sequence
  C3-targeting RNA guide sequence portion
guuuggugggauguguggcccc

SEQ ID NO: 6581 - RNA, 22 nt, Artificial Sequence
  C3-targeting RNA guide sequence portion
guuuguggaauccagguaucau

SEQ ID NO: 6582 - RNA, 22 nt, Artificial Sequence
  C3-targeting RNA guide sequence portion
guuuguggaauccagguaucgu

SEQ ID NO: 6583 - RNA, 22 nt, Artificial Sequence
  C3-targeting RNA guide sequence portion
guuuguggaauccagguauggu

SEQ ID NO: 6584 - RNA, 22 nt, Artificial Sequence
  C3-targeting RNA guide sequence portion
guuuguggauucagggguuagc

SEQ ID NO: 6585 - RNA, 22 nt, Artificial Sequence
  C3-targeting RNA guide sequence portion
guuuguggguagagucauaacc

SEQ ID NO: 6586 - RNA, 22 nt, Artificial Sequence
  C3-targeting RNA guide sequence portion
guuuuggcguauguggguuugg

SEQ ID NO: 6587 - RNA, 22 nt, Artificial Sequence
  C3-targeting RNA guide sequence portion
uaaacacccaaacucucaggca

SEQ ID NO: 6588 - RNA, 22 nt, Artificial Sequence
  C3-targeting RNA guide sequence portion
uaaacacucaaacucccggaca

SEQ ID NO: 6589 - RNA, 22 nt, Artificial Sequence
  C3-targeting RNA guide sequence portion
uaaaccaacagaugaccucaau

SEQ ID NO: 6590 - RNA, 22 nt, Artificial Sequence
  C3-targeting RNA guide sequence portion
uaaacccacacaugccccaaac

SEQ ID NO: 6591 - RNA, 22 nt, Artificial Sequence
  C3-targeting RNA guide sequence portion
uaaacccacacugaaaauugca

SEQ ID NO: 6592 - RNA, 22 nt, Artificial Sequence
  C3-targeting RNA guide sequence portion
uaaaccucaaaucuuagagcac

SEQ ID NO: 6593 - RNA, 22 nt, Artificial Sequence
  C3-targeting RNA guide sequence portion
uaaaccuccaacaccccagucc

SEQ ID NO: 6594 - RNA, 22 nt, Artificial Sequence
  C3-targeting RNA guide sequence portion
uaaaccucuaccucucuaaaca

SEQ ID NO: 6595 - RNA, 22 nt, Artificial Sequence
  C3-targeting RNA guide sequence portion
uaaacuccaauuccacgauacc

SEQ ID NO: 6596 - RNA, 22 nt, Artificial Sequence
  C3-targeting RNA guide sequence portion
uaaacuccaauuccaugauacc

SEQ ID NO: 6597 - RNA, 22 nt, Artificial Sequence
  C3-targeting RNA guide sequence portion
uaaagauuggcuacuucggguu

SEQ ID NO: 6598 - RNA, 22 nt, Artificial Sequence
  C3-targeting RNA guide sequence portion
uaaauacaaucaauuccaaaug

SEQ ID NO: 6599 - RNA, 22 nt, Artificial Sequence
  C3-targeting RNA guide sequence portion
uaaccccugaauccacaaacac

SEQ ID NO: 6600 - RNA, 22 nt, Artificial Sequence
  C3-targeting RNA guide sequence portion
uaagauuugagguuuagagguu

SEQ ID NO: 6601 - RNA, 22 nt, Artificial Sequence
  C3-targeting RNA guide sequence portion
uaaucauucccaaccugcuaac

SEQ ID NO: 6602 - RNA, 22 nt, Artificial Sequence
  C3-targeting RNA guide sequence portion
uaauggcauuggcaagugcgcc

SEQ ID NO: 6603 - RNA, 22 nt, Artificial Sequence
  C3-targeting RNA guide sequence portion
uacaagauuugggaguuugcag

SEQ ID NO: 6604 - RNA, 22 nt, Artificial Sequence
  C3-targeting RNA guide sequence portion
uacaaucaauuccaaaugcccc

SEQ ID NO: 6605 - RNA, 22 nt, Artificial Sequence
  C3-targeting RNA guide sequence portion
uacacccuaaaccaacagauga

SEQ ID NO: 6606 - RNA, 22 nt, Artificial Sequence
  C3-targeting RNA guide sequence portion
uacagggaccuggacccccaaa

SEQ ID NO: 6607 - RNA, 22 nt, Artificial Sequence
  C3-targeting RNA guide sequence portion
uacauauuuggaguguuuagag

SEQ ID NO: 6608 - RNA, 22 nt, Artificial Sequence
  C3-targeting RNA guide sequence portion
uacaugaacccgaaguagccaa

SEQ ID NO: 6609 - RNA, 22 nt, Artificial Sequence
  C3-targeting RNA guide sequence portion
uacauuugggcugccugagagu

SEQ ID NO: 6610 - RNA, 22 nt, Artificial Sequence
  C3-targeting RNA guide sequence portion
uacauuugggcugccugugagu

SEQ ID NO: 6611 - RNA, 22 nt, Artificial Sequence
  C3-targeting RNA guide sequence portion
uacccaaacccacauacgccaa

SEQ ID NO: 6612 - RNA, 22 nt, Artificial Sequence
  C3-targeting RNA guide sequence portion
uacccacaaacagggcugguuc

SEQ ID NO: 6613 - RNA, 22 nt, Artificial Sequence
  C3-targeting RNA guide sequence portion
uaccuacccaaacccacauacg

SEQ ID NO: 6614 - RNA, 22 nt, Artificial Sequence
  C3-targeting RNA guide sequence portion
uaccucucuaaacacuccaaau

SEQ ID NO: 6615 - RNA, 22 nt, Artificial Sequence
  C3-targeting RNA guide sequence portion
uaccuggauuccacaaacaccc

SEQ ID NO: 6616 - RNA, 22 nt, Artificial Sequence
  C3-targeting RNA guide sequence portion
uacgccaaaaccucuaaaccuc

SEQ ID NO: 6617 - RNA, 22 nt, Artificial Sequence
  C3-targeting RNA guide sequence portion
uacuucggguucauguauaguu

SEQ ID NO: 6618 - RNA, 22 nt, Artificial Sequence
  C3-targeting RNA guide sequence portion
uagaaacaucccaaacuccaau

SEQ ID NO: 6619 - RNA, 22 nt, Artificial Sequence
  C3-targeting RNA guide sequence portion
uagaauucagggugcauuuggg

SEQ ID NO: 6620 - RNA, 22 nt, Artificial Sequence
  C3-targeting RNA guide sequence portion
uagaauugaggucaucuguugg

SEQ ID NO: 6621 - RNA, 22 nt, Artificial Sequence
  C3-targeting RNA guide sequence portion
uagagagguagagguuuagggu

SEQ ID NO: 6622 - RNA, 22 nt, Artificial Sequence
  C3-targeting RNA guide sequence portion
uagagcaccccaaacccagccu

SEQ ID NO: 6623 - RNA, 22 nt, Artificial Sequence
  C3-targeting RNA guide sequence portion
uagagguuuaggguuuggggca

SEQ ID NO: 6624 - RNA, 22 nt, Artificial Sequence
  C3-targeting RNA guide sequence portion
uagagguuuuggcguauguggg

SEQ ID NO: 6625 - RNA, 22 nt, Artificial Sequence
  C3-targeting RNA guide sequence portion
uagaguugaggguguccgggag

SEQ ID NO: 6626 - RNA, 22 nt, Artificial Sequence
  C3-targeting RNA guide sequence portion
uagccaaucuuuaaacccacac

SEQ ID NO: 6627 - RNA, 22 nt, Artificial Sequence
  C3-targeting RNA guide sequence portion
uaggacugggguguuggagguu

SEQ ID NO: 6628 - RNA, 22 nt, Artificial Sequence
  C3-targeting RNA guide sequence portion
uaggcgauugugggucuggaag

SEQ ID NO: 6629 - RNA, 22 nt, Artificial Sequence
  C3-targeting RNA guide sequence portion
uaggcuggguuuggggugcucu

SEQ ID NO: 6630 - RNA, 22 nt, Artificial Sequence
  C3-targeting RNA guide sequence portion
uaggguguaugugguguucauu

SEQ ID NO: 6631 - RNA, 22 nt, Artificial Sequence
  C3-targeting RNA guide sequence portion
uaggguuuggggcauguguggg

SEQ ID NO: 6632 - RNA, 22 nt, Artificial Sequence
  C3-targeting RNA guide sequence portion
uagguagaguugaggguguccg

SEQ ID NO: 6633 - RNA, 22 nt, Artificial Sequence
  C3-targeting RNA guide sequence portion
uaguuggggcauuuggaauuga

SEQ ID NO: 6634 - RNA, 22 nt, Artificial Sequence
  C3-targeting RNA guide sequence portion
uauaaacuccaauuccacgaua

SEQ ID NO: 6635 - RNA, 22 nt, Artificial Sequence
  C3-targeting RNA guide sequence portion
uauaaacuccaauuccaugaua

SEQ ID NO: 6636 - RNA, 22 nt, Artificial Sequence
  C3-targeting RNA guide sequence portion
uauaaucauucccaaccugcua

SEQ ID NO: 6637 - RNA, 22 nt, Artificial Sequence
  C3-targeting RNA guide sequence portion
uauacaugaacccgaaguagcc

SEQ ID NO: 6638 - RNA, 22 nt, Artificial Sequence
  C3-targeting RNA guide sequence portion
uauacauuugggcugccugaga

SEQ ID NO: 6639 - RNA, 22 nt, Artificial Sequence
  C3-targeting RNA guide sequence portion
uauacauuugggcugccuguga

SEQ ID NO: 6640 - RNA, 22 nt, Artificial Sequence
  C3-targeting RNA guide sequence portion
uauaguuggggcauuuggaauu

SEQ ID NO: 6641 - RNA, 22 nt, Artificial Sequence
  C3-targeting RNA guide sequence portion
uauauaaacuccaauuccacga

SEQ ID NO: 6642 - RNA, 22 nt, Artificial Sequence
  C3-targeting RNA guide sequence portion
uauauaaacuccaauuccauga

SEQ ID NO: 6643 - RNA, 22 nt, Artificial Sequence
  C3-targeting RNA guide sequence portion
uauauaaucauucccaaccugc

SEQ ID NO: 6644 - RNA, 22 nt, Artificial Sequence
  C3-targeting RNA guide sequence portion
uauauacauuugggcugccuga

SEQ ID NO: 6645 - RNA, 22 nt, Artificial Sequence
  C3-targeting RNA guide sequence portion
uauauacauuugggcugccugu

SEQ ID NO: 6646 - RNA, 22 nt, Artificial Sequence
  C3-targeting RNA guide sequence portion
uauauauaaucauucccaaccu

SEQ ID NO: 6647 - RNA, 22 nt, Artificial Sequence
  C3-targeting RNA guide sequence portion
uauauauauuugggcugccugu

SEQ ID NO: 6648 - RNA, 22 nt, Artificial Sequence
  C3-targeting RNA guide sequence portion
uauauauuugggcugccuguga

SEQ ID NO: 6649 - RNA, 22 nt, Artificial Sequence
  C3-targeting RNA guide sequence portion
uauauuugggcugccugugagu

SEQ ID NO: 6650 - RNA, 22 nt, Artificial Sequence
  C3-targeting RNA guide sequence portion
uaucuucucugggcacugccac

SEQ ID NO: 6651 - RNA, 22 nt, Artificial Sequence
  C3-targeting RNA guide sequence portion
uaugacucuacccacaaacagg

SEQ ID NO: 6652 - RNA, 22 nt, Artificial Sequence
  C3-targeting RNA guide sequence portion
uauggguuggguguuuguggaa

SEQ ID NO: 6653 - RNA, 22 nt, Artificial Sequence
  C3-targeting RNA guide sequence portion
uaugguggaauuggaguuuggg

SEQ ID NO: 6654 - RNA, 22 nt, Artificial Sequence
  C3-targeting RNA guide sequence portion
uauguaaacacucaaacucccg

SEQ ID NO: 6655 - RNA, 22 nt, Artificial Sequence
  C3-targeting RNA guide sequence portion
uauguggguuuggguagguaga

SEQ ID NO: 6656 - RNA, 22 nt, Artificial Sequence
  C3-targeting RNA guide sequence portion
uaugugguguucauugauggug

SEQ ID NO: 6657 - RNA, 22 nt, Artificial Sequence
  C3-targeting RNA guide sequence portion
uauuaggacugggguguuggag

SEQ ID NO: 6658 - RNA, 22 nt, Artificial Sequence
  C3-targeting RNA guide sequence portion
uauuuauuaggacugggguguu

SEQ ID NO: 6659 - RNA, 22 nt, Artificial Sequence
  C3-targeting RNA guide sequence portion
uauuuggaguguuuagagaggu

SEQ ID NO: 6660 - RNA, 22 nt, Artificial Sequence
  C3-targeting RNA guide sequence portion
uauuugggcugccugugaguuu

SEQ ID NO: 6661 - RNA, 22 nt, Artificial Sequence
  C3-targeting RNA guide sequence portion
ucaaacucccggacacccucaa

SEQ ID NO: 6662 - RNA, 22 nt, Artificial Sequence
  C3-targeting RNA guide sequence portion
ucaaaggccaggcccagcuggc

SEQ ID NO: 6663 - RNA, 22 nt, Artificial Sequence
  C3-targeting RNA guide sequence portion
ucaaaucuuagagcaccccaaa

SEQ ID NO: 6664 - RNA, 22 nt, Artificial Sequence
  C3-targeting RNA guide sequence portion
ucaaccacaugggcaggacagc

SEQ ID NO: 6665 - RNA, 22 nt, Artificial Sequence
  C3-targeting RNA guide sequence portion
ucaacucuaccuacccaaaccc

SEQ ID NO: 6666 - RNA, 22 nt, Artificial Sequence
  C3-targeting RNA guide sequence portion
ucaaugaacaccacauacaccc

SEQ ID NO: 6667 - RNA, 22 nt, Artificial Sequence
  C3-targeting RNA guide sequence portion
ucaauuccaaaugccccaacua

SEQ ID NO: 6668 - RNA, 22 nt, Artificial Sequence
  C3-targeting RNA guide sequence portion
ucaauucuagaaacaucccaaa

SEQ ID NO: 6669 - RNA, 22 nt, Artificial Sequence
  C3-targeting RNA guide sequence portion
ucacaggcagcccaaauauaua

SEQ ID NO: 6670 - RNA, 22 nt, Artificial Sequence
  C3-targeting RNA guide sequence portion
ucacaggcagcccaaauguaua

SEQ ID NO: 6671 - RNA, 22 nt, Artificial Sequence
  C3-targeting RNA guide sequence portion
ucacauccguggaaugacaagc

SEQ ID NO: 6672 - RNA, 22 nt, Artificial Sequence
  C3-targeting RNA guide sequence portion
ucacuggagucagcgccuggca

SEQ ID NO: 6673 - RNA, 22 nt, Artificial Sequence
  C3-targeting RNA guide sequence portion
ucacuggauccucuccaggacc

SEQ ID NO: 6674 - RNA, 22 nt, Artificial Sequence
  C3-targeting RNA guide sequence portion
ucagcaacuccuccaagucucu

SEQ ID NO: 6675 - RNA, 22 nt, Artificial Sequence
  C3-targeting RNA guide sequence portion
ucagccagcugggccuggccuu

SEQ ID NO: 6676 - RNA, 22 nt, Artificial Sequence
  C3-targeting RNA guide sequence portion
ucagcgccuggcaggcugugug

SEQ ID NO: 6677 - RNA, 22 nt, Artificial Sequence
  C3-targeting RNA guide sequence portion
ucaggcagcccaaauguauaua

SEQ ID NO: 6678 - RNA, 22 nt, Artificial Sequence
  C3-targeting RNA guide sequence portion
ucagggguuagcagguugggaa

SEQ ID NO: 6679 - RNA, 22 nt, Artificial Sequence
  C3-targeting RNA guide sequence portion
ucagggugcauuuggguguuug

SEQ ID NO: 6680 - RNA, 22 nt, Artificial Sequence
  C3-targeting RNA guide sequence portion
ucaggguuuggugggaugugug

SEQ ID NO: 6681 - RNA, 22 nt, Artificial Sequence
  C3-targeting RNA guide sequence portion
ucaguguggguuuaaagauugg

SEQ ID NO: 6682 - RNA, 22 nt, Artificial Sequence
  C3-targeting RNA guide sequence portion
ucaucuguugguuuagggugua

SEQ ID NO: 6683 - RNA, 22 nt, Artificial Sequence
  C3-targeting RNA guide sequence portion
ucaugguggcugcuguccugcc

SEQ ID NO: 6684 - RNA, 22 nt, Artificial Sequence
  C3-targeting RNA guide sequence portion
ucauguauaguuggggcauuug

SEQ ID NO: 6685 - RNA, 22 nt, Artificial Sequence
  C3-targeting RNA guide sequence portion
ucauuccacggaugugagacgc

SEQ ID NO: 6686 - RNA, 22 nt, Artificial Sequence
  C3-targeting RNA guide sequence portion
ucauucccaaccugcuaacccc

SEQ ID NO: 6687 - RNA, 22 nt, Artificial Sequence
  C3-targeting RNA guide sequence portion
uccaaauauguaaacacucaaa

SEQ ID NO: 6688 - RNA, 22 nt, Artificial Sequence
  C3-targeting RNA guide sequence portion
uccaaaugccccaacuauacau

SEQ ID NO: 6689 - RNA, 22 nt, Artificial Sequence
  C3-targeting RNA guide sequence portion
uccaacaccccaguccuaauaa

SEQ ID NO: 6690 - RNA, 22 nt, Artificial Sequence
  C3-targeting RNA guide sequence portion
uccaaccagcgucagcaacucc

SEQ ID NO: 6691 - RNA, 22 nt, Artificial Sequence
  C3-targeting RNA guide sequence portion
uccaagucucuggacuuccaga

SEQ ID NO: 6692 - RNA, 22 nt, Artificial Sequence
  C3-targeting RNA guide sequence portion
uccaauuccaccauaccuggau

SEQ ID NO: 6693 - RNA, 22 nt, Artificial Sequence
  C3-targeting RNA guide sequence portion
uccaauuccacgauaccuggau

SEQ ID NO: 6694 - RNA, 22 nt, Artificial Sequence
  C3-targeting RNA guide sequence portion
uccaauuccaugauaccuggau

SEQ ID NO: 6695 - RNA, 22 nt, Artificial Sequence
  C3-targeting RNA guide sequence portion
uccacaaacacccaaaugcacc

SEQ ID NO: 6696 - RNA, 22 nt, Artificial Sequence
  C3-targeting RNA guide sequence portion
uccacaaacacccaacccauaa

SEQ ID NO: 6697 - RNA, 22 nt, Artificial Sequence
  C3-targeting RNA guide sequence portion
uccaccauaccuggauuccaca

SEQ ID NO: 6698 - RNA, 22 nt, Artificial Sequence
  C3-targeting RNA guide sequence portion
uccaccccagaaccagcccugu

SEQ ID NO: 6699 - RNA, 22 nt, Artificial Sequence
  C3-targeting RNA guide sequence portion
uccacgauaccuggauuccaca

SEQ ID NO: 6700 - RNA, 22 nt, Artificial Sequence
  C3-targeting RNA guide sequence portion
uccacggaugugagacgccagu

SEQ ID NO: 6701 - RNA, 22 nt, Artificial Sequence
  C3-targeting RNA guide sequence portion
uccagacccacaaucgccuaaa

SEQ ID NO: 6702 - RNA, 22 nt, Artificial Sequence
  C3-targeting RNA guide sequence portion
uccagagacuuggaggaguugc

SEQ ID NO: 6703 - RNA, 22 nt, Artificial Sequence
  C3-targeting RNA guide sequence portion
uccaggaccagaggcuggggca

SEQ ID NO: 6704 - RNA, 22 nt, Artificial Sequence
  C3-targeting RNA guide sequence portion
uccagguaucauggaauuggag

SEQ ID NO: 6705 - RNA, 22 nt, Artificial Sequence
  C3-targeting RNA guide sequence portion
uccagguaucguggaauuggag

SEQ ID NO: 6706 - RNA, 22 nt, Artificial Sequence
  C3-targeting RNA guide sequence portion
uccagguaugguggaauuggag

SEQ ID NO: 6707 - RNA, 22 nt, Artificial Sequence
  C3-targeting RNA guide sequence portion
uccaggucccuguagaauucag

SEQ ID NO: 6708 - RNA, 22 nt, Artificial Sequence
  C3-targeting RNA guide sequence portion
uccagugacugccggcgcacuu

SEQ ID NO: 6709 - RNA, 22 nt, Artificial Sequence
  C3-targeting RNA guide sequence portion
uccagugaggacuggcgucuca

SEQ ID NO: 6710 - RNA, 22 nt, Artificial Sequence
  C3-targeting RNA guide sequence portion
uccaugauaccuggauuccaca

SEQ ID NO: 6711 - RNA, 22 nt, Artificial Sequence
  C3-targeting RNA guide sequence portion
ucccaaacuccaauuccaccau

SEQ ID NO: 6712 - RNA, 22 nt, Artificial Sequence
  C3-targeting RNA guide sequence portion
ucccaaaucuuguaaaguccaa

SEQ ID NO: 6713 - RNA, 22 nt, Artificial Sequence
  C3-targeting RNA guide sequence portion
ucccaaccugcuaaccccugaa

SEQ ID NO: 6714 - RNA, 22 nt, Artificial Sequence
  C3-targeting RNA guide sequence portion
ucccaccaaacccugaaccuuc

SEQ ID NO: 6715 - RNA, 22 nt, Artificial Sequence
  C3-targeting RNA guide sequence portion
ucccacucucagccagcugggc

SEQ ID NO: 6716 - RNA, 22 nt, Artificial Sequence
  C3-targeting RNA guide sequence portion
uccccaagcugcaaacucccaa

SEQ ID NO: 6717 - RNA, 22 nt, Artificial Sequence
  C3-targeting RNA guide sequence portion
ucccggacacccucaacucuac

SEQ ID NO: 6718 - RNA, 22 nt, Artificial Sequence
  C3-targeting RNA guide sequence portion
ucccuguagaauucagggugca

SEQ ID NO: 6719 - RNA, 22 nt, Artificial Sequence
  C3-targeting RNA guide sequence portion
uccgggaguuugaguguuuaca

SEQ ID NO: 6720 - RNA, 22 nt, Artificial Sequence
  C3-targeting RNA guide sequence portion
uccguggaaugacaagcccacu

SEQ ID NO: 6721 - RNA, 22 nt, Artificial Sequence
  C3-targeting RNA guide sequence portion
uccucacuggagucagcgccug

SEQ ID NO: 6722 - RNA, 22 nt, Artificial Sequence
  C3-targeting RNA guide sequence portion
uccuccaagucucuggacuucc

SEQ ID NO: 6723 - RNA, 22 nt, Artificial Sequence
  C3-targeting RNA guide sequence portion
uccucuccaggaccagaggcug

SEQ ID NO: 6724 - RNA, 22 nt, Artificial Sequence
  C3-targeting RNA guide sequence portion
uccugcccaugugguugagacg

SEQ ID NO: 6725 - RNA, 22 nt, Artificial Sequence
  C3-targeting RNA guide sequence portion
uccuggagaggauccagugacu

SEQ ID NO: 6726 - RNA, 22 nt, Artificial Sequence
  C3-targeting RNA guide sequence portion
ucgccuaaacccacacaugccc

SEQ ID NO: 6727 - RNA, 22 nt, Artificial Sequence
  C3-targeting RNA guide sequence portion
ucggagguuuggacuuuacaag

SEQ ID NO: 6728 - RNA, 22 nt, Artificial Sequence
  C3-targeting RNA guide sequence portion
ucggaguggggcacgggagugg

SEQ ID NO: 6729 - RNA, 22 nt, Artificial Sequence
  C3-targeting RNA guide sequence portion
ucggguucauguauaguugggg

SEQ ID NO: 6730 - RNA, 22 nt, Artificial Sequence
  C3-targeting RNA guide sequence portion
ucguggaauuggaguuuauaua

SEQ ID NO: 6731 - RNA, 22 nt, Artificial Sequence
  C3-targeting RNA guide sequence portion
ucguugcccaggcuuucaaagg

SEQ ID NO: 6732 - RNA, 22 nt, Artificial Sequence
  C3-targeting RNA guide sequence portion
ucuaaacacuccaaauauguaa

SEQ ID NO: 6733 - RNA, 22 nt, Artificial Sequence
  C3-targeting RNA guide sequence portion
ucuaaaccucaaaucuuagagc

SEQ ID NO: 6734 - RNA, 22 nt, Artificial Sequence
  C3-targeting RNA guide sequence portion
ucuaagauuugagguuuagagg

SEQ ID NO: 6735 - RNA, 22 nt, Artificial Sequence
  C3-targeting RNA guide sequence portion
ucuacagggaccuggaccccca

SEQ ID NO: 6736 - RNA, 22 nt, Artificial Sequence
  C3-targeting RNA guide sequence portion
ucuacccacaaacagggcuggu

SEQ ID NO: 6737 - RNA, 22 nt, Artificial Sequence
  C3-targeting RNA guide sequence portion
ucuaccuacccaaacccacaua

SEQ ID NO: 6738 - RNA, 22 nt, Artificial Sequence
  C3-targeting RNA guide sequence portion
ucuaccucucuaaacacuccaa

SEQ ID NO: 6739 - RNA, 22 nt, Artificial Sequence
  C3-targeting RNA guide sequence portion
ucuagaaacaucccaaacucca

SEQ ID NO: 6740 - RNA, 22 nt, Artificial Sequence
  C3-targeting RNA guide sequence portion
ucuagaauugaggucaucuguu

SEQ ID NO: 6741 - RNA, 22 nt, Artificial Sequence
  C3-targeting RNA guide sequence portion
ucucaaccacaugggcaggaca

SEQ ID NO: 6742 - RNA, 22 nt, Artificial Sequence
  C3-targeting RNA guide sequence portion
ucucacauccguggaaugacaa

SEQ ID NO: 6743 - RNA, 22 nt, Artificial Sequence
  C3-targeting RNA guide sequence portion
ucucagccagcugggccuggcc

SEQ ID NO: 6744 - RNA, 22 nt, Artificial Sequence
  C3-targeting RNA guide sequence portion
ucucaggcagcccaaauguaua

SEQ ID NO: 6745 - RNA, 22 nt, Artificial Sequence
  C3-targeting RNA guide sequence portion
ucuccaggaccagaggcugggg

SEQ ID NO: 6746 - RNA, 22 nt, Artificial Sequence
  C3-targeting RNA guide sequence portion
ucucuaaacacuccaaauaugu

SEQ ID NO: 6747 - RNA, 22 nt, Artificial Sequence
  C3-targeting RNA guide sequence portion
ucucuggacuuccagacccaca

SEQ ID NO: 6748 - RNA, 22 nt, Artificial Sequence
  C3-targeting RNA guide sequence portion
ucucugggcacugccaccgucu

SEQ ID NO: 6749 - RNA, 22 nt, Artificial Sequence
  C3-targeting RNA guide sequence portion
ucugcuuccaccccagaaccag

SEQ ID NO: 6750 - RNA, 22 nt, Artificial Sequence
  C3-targeting RNA guide sequence portion
ucuggaaguccagagacuugga

SEQ ID NO: 6751 - RNA, 22 nt, Artificial Sequence
  C3-targeting RNA guide sequence portion
ucuggacuuccagacccacaau

SEQ ID NO: 6752 - RNA, 22 nt, Artificial Sequence
  C3-targeting RNA guide sequence portion
ucugggcacugccaccgucuca

SEQ ID NO: 6753 - RNA, 22 nt, Artificial Sequence
  C3-targeting RNA guide sequence portion
ucugggguggaagcagacauuu

SEQ ID NO: 6754 - RNA, 22 nt, Artificial Sequence
  C3-targeting RNA guide sequence portion
ucugguccuggagaggauccag

SEQ ID NO: 6755 - RNA, 22 nt, Artificial Sequence
  C3-targeting RNA guide sequence portion
ucuguugguuuaggguguaugu

SEQ ID NO: 6756 - RNA, 22 nt, Artificial Sequence
  C3-targeting RNA guide sequence portion
ucuuagagcaccccaaacccag

SEQ ID NO: 6757 - RNA, 22 nt, Artificial Sequence
  C3-targeting RNA guide sequence portion
ucuucucugggcacugccaccg

SEQ ID NO: 6758 - RNA, 22 nt, Artificial Sequence
  C3-targeting RNA guide sequence portion
ucuuguaaaguccaaaccuccg

SEQ ID NO: 6759 - RNA, 22 nt, Artificial Sequence
  C3-targeting RNA guide sequence portion
ucuuuaaacccacacugaaaau

SEQ ID NO: 6760 - RNA, 22 nt, Artificial Sequence
  C3-targeting RNA guide sequence portion
ugaaaauugcaaguccccaagc

SEQ ID NO: 6761 - RNA, 22 nt, Artificial Sequence
  C3-targeting RNA guide sequence portion
ugaaagccugggcaacgagggg

SEQ ID NO: 6762 - RNA, 22 nt, Artificial Sequence
  C3-targeting RNA guide sequence portion
ugaacaccacauacacccuaaa

SEQ ID NO: 6763 - RNA, 22 nt, Artificial Sequence
  C3-targeting RNA guide sequence portion
ugaacccgaaguagccaaucuu

SEQ ID NO: 6764 - RNA, 22 nt, Artificial Sequence
  C3-targeting RNA guide sequence portion
ugaaccuuccaaccagcgucag

SEQ ID NO: 6765 - RNA, 22 nt, Artificial Sequence
  C3-targeting RNA guide sequence portion
ugaauccacaaacacccaaaug

SEQ ID NO: 6766 - RNA, 22 nt, Artificial Sequence
  C3-targeting RNA guide sequence portion
ugaauucuacagggaccuggac

SEQ ID NO: 6767 - RNA, 22 nt, Artificial Sequence
  C3-targeting RNA guide sequence portion
ugacaagcccacucccgugccc

SEQ ID NO: 6768 - RNA, 22 nt, Artificial Sequence
  C3-targeting RNA guide sequence portion
ugaccucaauucuagaaacauc

SEQ ID NO: 6769 - RNA, 22 nt, Artificial Sequence
  C3-targeting RNA guide sequence portion
ugacgcugguuggaagguucag

SEQ ID NO: 6770 - RNA, 22 nt, Artificial Sequence
  C3-targeting RNA guide sequence portion
ugacuccagugaggacuggcgu

SEQ ID NO: 6771 - RNA, 22 nt, Artificial Sequence
  C3-targeting RNA guide sequence portion
ugacucccacucucagccagcu

SEQ ID NO: 6772 - RNA, 22 nt, Artificial Sequence
  C3-targeting RNA guide sequence portion
ugacucuacccacaaacagggc

SEQ ID NO: 6773 - RNA, 22 nt, Artificial Sequence
  C3-targeting RNA guide sequence portion
ugacugccggcgcacuugccaa

SEQ ID NO: 6774 - RNA, 22 nt, Artificial Sequence
  C3-targeting RNA guide sequence portion
ugagacgccaguccucacugga

SEQ ID NO: 6775 - RNA, 22 nt, Artificial Sequence
  C3-targeting RNA guide sequence portion
ugagacgguggcagugcccaga

SEQ ID NO: 6776 - RNA, 22 nt, Artificial Sequence
  C3-targeting RNA guide sequence portion
ugagagugggagucaugguggc

SEQ ID NO: 6777 - RNA, 22 nt, Artificial Sequence
  C3-targeting RNA guide sequence portion
ugagaguuuggguguuuauggg

SEQ ID NO: 6778 - RNA, 22 nt, Artificial Sequence
  C3-targeting RNA guide sequence portion
ugaggacuggcgucucacaucc

SEQ ID NO: 6779 - RNA, 22 nt, Artificial Sequence
  C3-targeting RNA guide sequence portion
ugaggguguccgggaguuugag

SEQ ID NO: 6780 - RNA, 22 nt, Artificial Sequence
  C3-targeting RNA guide sequence portion
ugaggucaucuguugguuuagg

SEQ ID NO: 6781 - RNA, 22 nt, Artificial Sequence
  C3-targeting RNA guide sequence portion
ugagguuuagagguuuuggcgu

SEQ ID NO: 6782 - RNA, 22 nt, Artificial Sequence
  C3-targeting RNA guide sequence portion
ugagugguuaugacucuaccca

SEQ ID NO: 6783 - RNA, 22 nt, Artificial Sequence
  C3-targeting RNA guide sequence portion
ugaguguuuacauauuuggagu

SEQ ID NO: 6784 - RNA, 22 nt, Artificial Sequence
  C3-targeting RNA guide sequence portion
ugauaccuggauuccacaaaca

SEQ ID NO: 6785 - RNA, 22 nt, Artificial Sequence
  C3-targeting RNA guide sequence portion
ugauuauauauauuugggcugc

SEQ ID NO: 6786 - RNA, 22 nt, Artificial Sequence
  C3-targeting RNA guide sequence portion
ugauuguauuuauuaggacugg

SEQ ID NO: 6787 - RNA, 22 nt, Artificial Sequence
  C3-targeting RNA guide sequence portion
ugcaaacucccaaaucuuguaa

SEQ ID NO: 6788 - RNA, 22 nt, Artificial Sequence
  C3-targeting RNA guide sequence portion
ugcaaguccccaagcugcaaac

SEQ ID NO: 6789 - RNA, 22 nt, Artificial Sequence
  C3-targeting RNA guide sequence portion
ugcaauuuucaguguggguuua

SEQ ID NO: 6790 - RNA, 22 nt, Artificial Sequence
  C3-targeting RNA guide sequence portion
ugcacccugaauucuacaggga

SEQ ID NO: 6791 - RNA, 22 nt, Artificial Sequence
  C3-targeting RNA guide sequence portion
ugcagcuuggggacuugcaauu

SEQ ID NO: 6792 - RNA, 22 nt, Artificial Sequence
  C3-targeting RNA guide sequence portion
ugcauuuggguguuuguggauu

SEQ ID NO: 6793 - RNA, 22 nt, Artificial Sequence
  C3-targeting RNA guide sequence portion
ugccaaugccauuaucuucucu

SEQ ID NO: 6794 - RNA, 22 nt, Artificial Sequence
  C3-targeting RNA guide sequence portion
ugccaccgucucaaccacaugg

SEQ ID NO: 6795 - RNA, 22 nt, Artificial Sequence
  C3-targeting RNA guide sequence portion
ugccaggcgcugacuccaguga

SEQ ID NO: 6796 - RNA, 22 nt, Artificial Sequence
  C3-targeting RNA guide sequence portion
ugccauuaucuucucugggcac

SEQ ID NO: 6797 - RNA, 22 nt, Artificial Sequence
  C3-targeting RNA guide sequence portion
ugcccagagaagauaauggcau

SEQ ID NO: 6798 - RNA, 22 nt, Artificial Sequence
  C3-targeting RNA guide sequence portion
ugcccaggcuuucaaaggccag

SEQ ID NO: 6799 - RNA, 22 nt, Artificial Sequence
  C3-targeting RNA guide sequence portion
ugcccaugugguugagacggug

SEQ ID NO: 6800 - RNA, 22 nt, Artificial Sequence
  C3-targeting RNA guide sequence portion
ugccccaaacccuaaaccucua

SEQ ID NO: 6801 - RNA, 22 nt, Artificial Sequence
  C3-targeting RNA guide sequence portion
ugccccaacuauacaugaaccc

SEQ ID NO: 6802 - RNA, 22 nt, Artificial Sequence
  C3-targeting RNA guide sequence portion
ugccccagccucugguccugga

SEQ ID NO: 6803 - RNA, 22 nt, Artificial Sequence
  C3-targeting RNA guide sequence portion
ugccggcgcacuugccaaugcc

SEQ ID NO: 6804 - RNA, 22 nt, Artificial Sequence
  C3-targeting RNA guide sequence portion
ugccugagaguuuggguguuua

SEQ ID NO: 6805 - RNA, 22 nt, Artificial Sequence
  C3-targeting RNA guide sequence portion
ugcgccggcagucacuggaucc

SEQ ID NO: 6806 - RNA, 22 nt, Artificial Sequence
  C3-targeting RNA guide sequence portion
ugcuaaccccugaauccacaaa

SEQ ID NO: 6807 - RNA, 22 nt, Artificial Sequence
  C3-targeting RNA guide sequence portion
ugcucuaagauuugagguuuag

SEQ ID NO: 6808 - RNA, 22 nt, Artificial Sequence
  C3-targeting RNA guide sequence portion
ugcugacgcugguuggaagguu

SEQ ID NO: 6809 - RNA, 22 nt, Artificial Sequence
  C3-targeting RNA guide sequence portion
ugcuguccugcccaugugguug

SEQ ID NO: 6810 - RNA, 22 nt, Artificial Sequence
  C3-targeting RNA guide sequence portion
ugcuuccaccccagaaccagcc

SEQ ID NO: 6811 - RNA, 22 nt, Artificial Sequence
  C3-targeting RNA guide sequence portion
uggaagcagacauuuggggguc

SEQ ID NO: 6812 - RNA, 22 nt, Artificial Sequence
  C3-targeting RNA guide sequence portion
uggaagguucaggguuuggugg

SEQ ID NO: 6813 - RNA, 22 nt, Artificial Sequence
  C3-targeting RNA guide sequence portion
uggaaguccagagacuuggagg

SEQ ID NO: 6814 - RNA, 22 nt, Artificial Sequence
  C3-targeting RNA guide sequence portion
uggaauccagguaucauggaau

SEQ ID NO: 6815 - RNA, 22 nt, Artificial Sequence
  C3-targeting RNA guide sequence portion
uggaauccagguaucguggaau

SEQ ID NO: 6816 - RNA, 22 nt, Artificial Sequence
  C3-targeting RNA guide sequence portion
uggaauccagguaugguggaau

SEQ ID NO: 6817 - RNA, 22 nt, Artificial Sequence
  C3-targeting RNA guide sequence portion
uggaaugacaagcccacucccg

SEQ ID NO: 6818 - RNA, 22 nt, Artificial Sequence
  C3-targeting RNA guide sequence portion
uggaauugauuguauuuauuag

SEQ ID NO: 6819 - RNA, 22 nt, Artificial Sequence
  C3-targeting RNA guide sequence portion
uggaauuggaguuugggauguu

SEQ ID NO: 6820 - RNA, 22 nt, Artificial Sequence
  C3-targeting RNA guide sequence portion
uggacccccaaaugucugcuuc

SEQ ID NO: 6821 - RNA, 22 nt, Artificial Sequence
  C3-targeting RNA guide sequence portion
uggacuuccagacccacaaucg

SEQ ID NO: 6822 - RNA, 22 nt, Artificial Sequence
  C3-targeting RNA guide sequence portion
uggacuuuacaagauuugggag

SEQ ID NO: 6823 - RNA, 22 nt, Artificial Sequence
  C3-targeting RNA guide sequence portion
uggagacucggagguuuggacu

SEQ ID NO: 6824 - RNA, 22 nt, Artificial Sequence
  C3-targeting RNA guide sequence portion
uggagaggauccagugacugcc

SEQ ID NO: 6825 - RNA, 22 nt, Artificial Sequence
  C3-targeting RNA guide sequence portion
uggaggaguugcugacgcuggu

SEQ ID NO: 6826 - RNA, 22 nt, Artificial Sequence
  C3-targeting RNA guide sequence portion
uggagguuuaggcuggguuugg

SEQ ID NO: 6827 - RNA, 22 nt, Artificial Sequence
  C3-targeting RNA guide sequence portion
uggagucagcgccuggcaggcu

SEQ ID NO: 6828 - RNA, 22 nt, Artificial Sequence
  C3-targeting RNA guide sequence portion
uggaguguuuagagagguagag

SEQ ID NO: 6829 - RNA, 22 nt, Artificial Sequence
  C3-targeting RNA guide sequence portion
uggaguuugggauguuucuaga

SEQ ID NO: 6830 - RNA, 22 nt, Artificial Sequence
  C3-targeting RNA guide sequence portion
uggauccucuccaggaccagag

SEQ ID NO: 6831 - RNA, 22 nt, Artificial Sequence
  C3-targeting RNA guide sequence portion
uggauucagggguuagcagguu

SEQ ID NO: 6832 - RNA, 22 nt, Artificial Sequence
  C3-targeting RNA guide sequence portion
uggauuccacaaacacccaacc

SEQ ID NO: 6833 - RNA, 22 nt, Artificial Sequence
  C3-targeting RNA guide sequence portion
uggcaagugcgccggcagucac

SEQ ID NO: 6834 - RNA, 22 nt, Artificial Sequence
  C3-targeting RNA guide sequence portion
uggcaggcugugugccccagcc

SEQ ID NO: 6835 - RNA, 22 nt, Artificial Sequence
  C3-targeting RNA guide sequence portion
uggcagugcccagagaagauaa

SEQ ID NO: 6836 - RNA, 22 nt, Artificial Sequence
  C3-targeting RNA guide sequence portion
uggcauuggcaagugcgccggc

SEQ ID NO: 6837 - RNA, 22 nt, Artificial Sequence
  C3-targeting RNA guide sequence portion
uggcccccucguugcccaggcu

SEQ ID NO: 6838 - RNA, 22 nt, Artificial Sequence
  C3-targeting RNA guide sequence portion
uggccuuugaaagccugggcaa

SEQ ID NO: 6839 - RNA, 22 nt, Artificial Sequence
  C3-targeting RNA guide sequence portion
uggcguauguggguuuggguag

SEQ ID NO: 6840 - RNA, 22 nt, Artificial Sequence
  C3-targeting RNA guide sequence portion
uggcgucucacauccguggaau

SEQ ID NO: 6841 - RNA, 22 nt, Artificial Sequence
  C3-targeting RNA guide sequence portion
uggcuacuucggguucauguau

SEQ ID NO: 6842 - RNA, 22 nt, Artificial Sequence
  C3-targeting RNA guide sequence portion
uggcugagagugggagucaugg

SEQ ID NO: 6843 - RNA, 22 nt, Artificial Sequence
  C3-targeting RNA guide sequence portion
uggcugcuguccugcccaugug

SEQ ID NO: 6844 - RNA, 22 nt, Artificial Sequence
  C3-targeting RNA guide sequence portion
ugggaaugauuauauauauuug

SEQ ID NO: 6845 - RNA, 22 nt, Artificial Sequence
  C3-targeting RNA guide sequence portion
ugggagucaugguggcugcugu

SEQ ID NO: 6846 - RNA, 22 nt, Artificial Sequence
  C3-targeting RNA guide sequence portion
ugggaguuugcagcuuggggac

SEQ ID NO: 6847 - RNA, 22 nt, Artificial Sequence
  C3-targeting RNA guide sequence portion
ugggauguguggcccccucguu

SEQ ID NO: 6848 - RNA, 22 nt, Artificial Sequence
  C3-targeting RNA guide sequence portion
ugggauguuucuagaauugagg

SEQ ID NO: 6849 - RNA, 22 nt, Artificial Sequence
  C3-targeting RNA guide sequence portion
ugggcaacgagggggccacaca

SEQ ID NO: 6850 - RNA, 22 nt, Artificial Sequence
  C3-targeting RNA guide sequence portion
ugggcacugccaccgucucaac

SEQ ID NO: 6851 - RNA, 22 nt, Artificial Sequence
  C3-targeting RNA guide sequence portion
ugggcaggacagcagccaccau

SEQ ID NO: 6852 - RNA, 22 nt, Artificial Sequence
  C3-targeting RNA guide sequence portion
ugggccuggccuuugaaagccu

SEQ ID NO: 6853 - RNA, 22 nt, Artificial Sequence
  C3-targeting RNA guide sequence portion
ugggcugccugagaguuugggu

SEQ ID NO: 6854 - RNA, 22 nt, Artificial Sequence
  C3-targeting RNA guide sequence portion
ugggcuugucauuccacggaug

SEQ ID NO: 6855 - RNA, 22 nt, Artificial Sequence
  C3-targeting RNA guide sequence portion
uggggacuugcaauuuucagug

SEQ ID NO: 6856 - RNA, 22 nt, Artificial Sequence
  C3-targeting RNA guide sequence portion
uggggcacacagccugccaggc

SEQ ID NO: 6857 - RNA, 22 nt, Artificial Sequence
  C3-targeting RNA guide sequence portion
uggggcacgggagugggcuugu

SEQ ID NO: 6858 - RNA, 22 nt, Artificial Sequence
  C3-targeting RNA guide sequence portion
uggggcauguguggguuuaggc

SEQ ID NO: 6859 - RNA, 22 nt, Artificial Sequence
  C3-targeting RNA guide sequence portion
uggggcauuuggaauugauugu

SEQ ID NO: 6860 - RNA, 22 nt, Artificial Sequence
  C3-targeting RNA guide sequence portion
uggggguccaggucccuguaga

SEQ ID NO: 6861 - RNA, 22 nt, Artificial Sequence
  C3-targeting RNA guide sequence portion
uggggugcucuaagauuugagg

SEQ ID NO: 6862 - RNA, 22 nt, Artificial Sequence
  C3-targeting RNA guide sequence portion
ugggguggaagcagacauuugg

SEQ ID NO: 6863 - RNA, 22 nt, Artificial Sequence
  C3-targeting RNA guide sequence portion
ugggguguuggagguuuaggcu

SEQ ID NO: 6864 - RNA, 22 nt, Artificial Sequence
  C3-targeting RNA guide sequence portion
uggguagguagaguugagggug

SEQ ID NO: 6865 - RNA, 22 nt, Artificial Sequence
  C3-targeting RNA guide sequence portion
ugggucuggaaguccagagacu

SEQ ID NO: 6866 - RNA, 22 nt, Artificial Sequence
  C3-targeting RNA guide sequence portion
uggguguuuauggguugggugu

SEQ ID NO: 6867 - RNA, 22 nt, Artificial Sequence
  C3-targeting RNA guide sequence portion
uggguguuuguggaauccaggu

SEQ ID NO: 6868 - RNA, 22 nt, Artificial Sequence
  C3-targeting RNA guide sequence portion
uggguguuuguggauucagggg

SEQ ID NO: 6869 - RNA, 22 nt, Artificial Sequence
  C3-targeting RNA guide sequence portion
uggguuggguguuuguggaauc

SEQ ID NO: 6870 - RNA, 22 nt, Artificial Sequence
  C3-targeting RNA guide sequence portion
uggguuuaaagauuggcuacuu

SEQ ID NO: 6871 - RNA, 22 nt, Artificial Sequence
  C3-targeting RNA guide sequence portion
uggguuuaggcgauuguggguc

SEQ ID NO: 6872 - RNA, 22 nt, Artificial Sequence
  C3-targeting RNA guide sequence portion
uggguuuggggugcucuaagau

SEQ ID NO: 6873 - RNA, 22 nt, Artificial Sequence
  C3-targeting RNA guide sequence portion
uggguuuggguagguagaguug

SEQ ID NO: 6874 - RNA, 22 nt, Artificial Sequence
  C3-targeting RNA guide sequence portion
ugguccuggagaggauccagug

SEQ ID NO: 6875 - RNA, 22 nt, Artificial Sequence
  C3-targeting RNA guide sequence portion
ugguggaauuggaguuugggau

SEQ ID NO: 6876 - RNA, 22 nt, Artificial Sequence
  C3-targeting RNA guide sequence portion
ugguggcugcuguccugcccau

SEQ ID NO: 6877 - RNA, 22 nt, Artificial Sequence
  C3-targeting RNA guide sequence portion
uggugggauguguggcccccuc

SEQ ID NO: 6878 - RNA, 22 nt, Artificial Sequence
  C3-targeting RNA guide sequence portion
ugguuaugacucuacccacaaa

SEQ ID NO: 6879 - RNA, 22 nt, Artificial Sequence
  C3-targeting RNA guide sequence portion
ugguucugggguggaagcagac

SEQ ID NO: 6880 - RNA, 22 nt, Artificial Sequence
  C3-targeting RNA guide sequence portion
ugguugagacgguggcagugcc

SEQ ID NO: 6881 - RNA, 22 nt, Artificial Sequence
  C3-targeting RNA guide sequence portion
ugguuggaagguucaggguuug

SEQ ID NO: 6882 - RNA, 22 nt, Artificial Sequence
  C3-targeting RNA guide sequence portion
ugguuuaggguguauguggugu

SEQ ID NO: 6883 - RNA, 22 nt, Artificial Sequence
  C3-targeting RNA guide sequence portion
uguaaacacucaaacucccgga

SEQ ID NO: 6884 - RNA, 22 nt, Artificial Sequence
  C3-targeting RNA guide sequence portion
uguaaaguccaaaccuccgagu

SEQ ID NO: 6885 - RNA, 22 nt, Artificial Sequence
  C3-targeting RNA guide sequence portion
uguagaauucagggugcauuug

SEQ ID NO: 6886 - RNA, 22 nt, Artificial Sequence
  C3-targeting RNA guide sequence portion
uguauaguuggggcauuuggaa

SEQ ID NO: 6887 - RNA, 22 nt, Artificial Sequence
  C3-targeting RNA guide sequence portion
uguauauaaacuccaauuccac

SEQ ID NO: 6888 - RNA, 22 nt, Artificial Sequence
  C3-targeting RNA guide sequence portion
uguauauaaacuccaauuccau

SEQ ID NO: 6889 - RNA, 22 nt, Artificial Sequence
  C3-targeting RNA guide sequence portion
uguaugugguguucauugaugg

SEQ ID NO: 6890 - RNA, 22 nt, Artificial Sequence
  C3-targeting RNA guide sequence portion
uguauuuauuaggacuggggug

SEQ ID NO: 6891 - RNA, 22 nt, Artificial Sequence
  C3-targeting RNA guide sequence portion
ugucauuccacggaugugagac

SEQ ID NO: 6892 - RNA, 22 nt, Artificial Sequence
  C3-targeting RNA guide sequence portion
uguccgggaguuugaguguuua

SEQ ID NO: 6893 - RNA, 22 nt, Artificial Sequence
  C3-targeting RNA guide sequence portion
uguccugcccaugugguugaga

SEQ ID NO: 6894 - RNA, 22 nt, Artificial Sequence
  C3-targeting RNA guide sequence portion
ugucggaguggggcacgggagu

SEQ ID NO: 6895 - RNA, 22 nt, Artificial Sequence
  C3-targeting RNA guide sequence portion
ugucugcuuccaccccagaacc

SEQ ID NO: 6896 - RNA, 22 nt, Artificial Sequence
  C3-targeting RNA guide sequence portion
ugugagacgccaguccucacug

SEQ ID NO: 6897 - RNA, 22 nt, Artificial Sequence
  C3-targeting RNA guide sequence portion
ugugccccagccucugguccug

SEQ ID NO: 6898 - RNA, 22 nt, Artificial Sequence
  C3-targeting RNA guide sequence portion
uguggaauccagguaucaugga

SEQ ID NO: 6899 - RNA, 22 nt, Artificial Sequence
  C3-targeting RNA guide sequence portion
uguggaauccagguaucgugga

SEQ ID NO: 6900 - RNA, 22 nt, Artificial Sequence
  C3-targeting RNA guide sequence portion
uguggaauccagguauggugga

SEQ ID NO: 6901 - RNA, 22 nt, Artificial Sequence
  C3-targeting RNA guide sequence portion
uguggauucagggguuagcagg

SEQ ID NO: 6902 - RNA, 22 nt, Artificial Sequence
  C3-targeting RNA guide sequence portion
uguggcccccucguugcccagg

SEQ ID NO: 6903 - RNA, 22 nt, Artificial Sequence
  C3-targeting RNA guide sequence portion
ugugggucuggaaguccagaga

SEQ ID NO: 6904 - RNA, 22 nt, Artificial Sequence
  C3-targeting RNA guide sequence portion
uguggguuuaaagauuggcuac

SEQ ID NO: 6905 - RNA, 22 nt, Artificial Sequence
  C3-targeting RNA guide sequence portion
uguggguuuaggcgauuguggg

SEQ ID NO: 6906 - RNA, 22 nt, Artificial Sequence
  C3-targeting RNA guide sequence portion
uguggguuuggguagguagagu

SEQ ID NO: 6907 - RNA, 22 nt, Artificial Sequence
  C3-targeting RNA guide sequence portion
ugugguguucauugauggugcg

SEQ ID NO: 6908 - RNA, 22 nt, Artificial Sequence
  C3-targeting RNA guide sequence portion
ugugguugagacgguggcagug

SEQ ID NO: 6909 - RNA, 22 nt, Artificial Sequence
  C3-targeting RNA guide sequence portion
ugugugccccagccucuggucc

SEQ ID NO: 6910 - RNA, 22 nt, Artificial Sequence
  C3-targeting RNA guide sequence portion
uguguggcccccucguugccca

SEQ ID NO: 6911 - RNA, 22 nt, Artificial Sequence
  C3-targeting RNA guide sequence portion
uguguggguuuaggcgauugug

SEQ ID NO: 6912 - RNA, 22 nt, Artificial Sequence
  C3-targeting RNA guide sequence portion
uguuggagguuuaggcuggguu

SEQ ID NO: 6913 - RNA, 22 nt, Artificial Sequence
  C3-targeting RNA guide sequence portion
uguugguuuaggguguaugugg

SEQ ID NO: 6914 - RNA, 22 nt, Artificial Sequence
  C3-targeting RNA guide sequence portion
uguuuacauauuuggaguguuu

SEQ ID NO: 6915 - RNA, 22 nt, Artificial Sequence
  C3-targeting RNA guide sequence portion
uguuuagagagguagagguuua

SEQ ID NO: 6916 - RNA, 22 nt, Artificial Sequence
  C3-targeting RNA guide sequence portion
uguuuauggguuggguguuugu

SEQ ID NO: 6917 - RNA, 22 nt, Artificial Sequence
  C3-targeting RNA guide sequence portion
uguuucuagaauugaggucauc

SEQ ID NO: 6918 - RNA, 22 nt, Artificial Sequence
  C3-targeting RNA guide sequence portion
uguuuguggaauccagguauca

SEQ ID NO: 6919 - RNA, 22 nt, Artificial Sequence
  C3-targeting RNA guide sequence portion
uguuuguggaauccagguaucg

SEQ ID NO: 6920 - RNA, 22 nt, Artificial Sequence
  C3-targeting RNA guide sequence portion
uguuuguggaauccagguaugg

SEQ ID NO: 6921 - RNA, 22 nt, Artificial Sequence
  C3-targeting RNA guide sequence portion
uguuuguggauucagggguuag

SEQ ID NO: 6922 - RNA, 22 nt, Artificial Sequence
  C3-targeting RNA guide sequence portion
uguuuguggguagagucauaac

SEQ ID NO: 6923 - RNA, 22 nt, Artificial Sequence
  C3-targeting RNA guide sequence portion
uuaaacccacacugaaaauugc

SEQ ID NO: 6924 - RNA, 22 nt, Artificial Sequence
  C3-targeting RNA guide sequence portion
uuaaagauuggcuacuucgggu

SEQ ID NO: 6925 - RNA, 22 nt, Artificial Sequence
  C3-targeting RNA guide sequence portion
uuacaagauuugggaguuugca

SEQ ID NO: 6926 - RNA, 22 nt, Artificial Sequence
  C3-targeting RNA guide sequence portion
uuacauauuuggaguguuuaga

SEQ ID NO: 6927 - RNA, 22 nt, Artificial Sequence
  C3-targeting RNA guide sequence portion
uuagagagguagagguuuaggg

SEQ ID NO: 6928 - RNA, 22 nt, Artificial Sequence
  C3-targeting RNA guide sequence portion
uuagagcaccccaaacccagcc

SEQ ID NO: 6929 - RNA, 22 nt, Artificial Sequence
  C3-targeting RNA guide sequence portion
uuagagguuuuggcguaugugg

SEQ ID NO: 6930 - RNA, 22 nt, Artificial Sequence
  C3-targeting RNA guide sequence portion
uuaggacugggguguuggaggu

SEQ ID NO: 6931 - RNA, 22 nt, Artificial Sequence
  C3-targeting RNA guide sequence portion
uuaggcgauugugggucuggaa

SEQ ID NO: 6932 - RNA, 22 nt, Artificial Sequence
  C3-targeting RNA guide sequence portion
uuaggcuggguuuggggugcuc

SEQ ID NO: 6933 - RNA, 22 nt, Artificial Sequence
  C3-targeting RNA guide sequence portion
uuaggguguaugugguguucau

SEQ ID NO: 6934 - RNA, 22 nt, Artificial Sequence
  C3-targeting RNA guide sequence portion
uuaggguuuggggcaugugugg

SEQ ID NO: 6935 - RNA, 22 nt, Artificial Sequence
  C3-targeting RNA guide sequence portion
uuauauacauuugggcugccug

SEQ ID NO: 6936 - RNA, 22 nt, Artificial Sequence
  C3-targeting RNA guide sequence portion
uuauauauauuugggcugccug

SEQ ID NO: 6937 - RNA, 22 nt, Artificial Sequence
  C3-targeting RNA guide sequence portion
uuaucuucucugggcacugcca

SEQ ID NO: 6938 - RNA, 22 nt, Artificial Sequence
  C3-targeting RNA guide sequence portion
uuaugacucuacccacaaacag

SEQ ID NO: 6939 - RNA, 22 nt, Artificial Sequence
  C3-targeting RNA guide sequence portion
uuauggguuggguguuugugga

SEQ ID NO: 6940 - RNA, 22 nt, Artificial Sequence
  C3-targeting RNA guide sequence portion
uuauuaggacugggguguugga

SEQ ID NO: 6941 - RNA, 22 nt, Artificial Sequence
  C3-targeting RNA guide sequence portion
uucaaaggccaggcccagcugg

SEQ ID NO: 6942 - RNA, 22 nt, Artificial Sequence
  C3-targeting RNA guide sequence portion
uucagggguuagcagguuggga

SEQ ID NO: 6943 - RNA, 22 nt, Artificial Sequence
  C3-targeting RNA guide sequence portion
uucagggugcauuuggguguuu

SEQ ID NO: 6944 - RNA, 22 nt, Artificial Sequence
  C3-targeting RNA guide sequence portion
uucaggguuuggugggaugugu

SEQ ID NO: 6945 - RNA, 22 nt, Artificial Sequence
  C3-targeting RNA guide sequence portion
uucaguguggguuuaaagauug

SEQ ID NO: 6946 - RNA, 22 nt, Artificial Sequence
  C3-targeting RNA guide sequence portion
uucauguauaguuggggcauuu

SEQ ID NO: 6947 - RNA, 22 nt, Artificial Sequence
  C3-targeting RNA guide sequence portion
uuccaaaugccccaacuauaca

SEQ ID NO: 6948 - RNA, 22 nt, Artificial Sequence
  C3-targeting RNA guide sequence portion
uuccaaccagcgucagcaacuc

SEQ ID NO: 6949 - RNA, 22 nt, Artificial Sequence
  C3-targeting RNA guide sequence portion
uuccacaaacacccaacccaua

SEQ ID NO: 6950 - RNA, 22 nt, Artificial Sequence
  C3-targeting RNA guide sequence portion
uuccaccauaccuggauuccac

SEQ ID NO: 6951 - RNA, 22 nt, Artificial Sequence
  C3-targeting RNA guide sequence portion
uuccaccccagaaccagcccug

SEQ ID NO: 6952 - RNA, 22 nt, Artificial Sequence
  C3-targeting RNA guide sequence portion
uuccacgauaccuggauuccac

SEQ ID NO: 6953 - RNA, 22 nt, Artificial Sequence
  C3-targeting RNA guide sequence portion
uuccacggaugugagacgccag

SEQ ID NO: 6954 - RNA, 22 nt, Artificial Sequence
  C3-targeting RNA guide sequence portion
uuccagacccacaaucgccuaa

SEQ ID NO: 6955 - RNA, 22 nt, Artificial Sequence
  C3-targeting RNA guide sequence portion
uuccaugauaccuggauuccac

SEQ ID NO: 6956 - RNA, 22 nt, Artificial Sequence
  C3-targeting RNA guide sequence portion
uucccaaccugcuaaccccuga

SEQ ID NO: 6957 - RNA, 22 nt, Artificial Sequence
  C3-targeting RNA guide sequence portion
uucggguucauguauaguuggg

SEQ ID NO: 6958 - RNA, 22 nt, Artificial Sequence
  C3-targeting RNA guide sequence portion
uucuacagggaccuggaccccc

SEQ ID NO: 6959 - RNA, 22 nt, Artificial Sequence
  C3-targeting RNA guide sequence portion
uucuagaaacaucccaaacucc

SEQ ID NO: 6960 - RNA, 22 nt, Artificial Sequence
  C3-targeting RNA guide sequence portion
uucuagaauugaggucaucugu

SEQ ID NO: 6961 - RNA, 22 nt, Artificial Sequence
  C3-targeting RNA guide sequence portion
uucucugggcacugccaccguc

SEQ ID NO: 6962 - RNA, 22 nt, Artificial Sequence
  C3-targeting RNA guide sequence portion
uucugggguggaagcagacauu

SEQ ID NO: 6963 - RNA, 22 nt, Artificial Sequence
  C3-targeting RNA guide sequence portion
uugaaagccugggcaacgaggg

SEQ ID NO: 6964 - RNA, 22 nt, Artificial Sequence
  C3-targeting RNA guide sequence portion
uugagacgguggcagugcccag

SEQ ID NO: 6965 - RNA, 22 nt, Artificial Sequence
  C3-targeting RNA guide sequence portion
uugaggguguccgggaguuuga

SEQ ID NO: 6966 - RNA, 22 nt, Artificial Sequence
  C3-targeting RNA guide sequence portion
uugaggucaucuguugguuuag

SEQ ID NO: 6967 - RNA, 22 nt, Artificial Sequence
  C3-targeting RNA guide sequence portion
uugagguuuagagguuuuggcg

SEQ ID NO: 6968 - RNA, 22 nt, Artificial Sequence
  C3-targeting RNA guide sequence portion
uugauuguauuuauuaggacug

SEQ ID NO: 6969 - RNA, 22 nt, Artificial Sequence
  C3-targeting RNA guide sequence portion
uugcaaguccccaagcugcaaa

SEQ ID NO: 6970 - RNA, 22 nt, Artificial Sequence
  C3-targeting RNA guide sequence portion
uugcaauuuucaguguggguuu

SEQ ID NO: 6971 - RNA, 22 nt, Artificial Sequence
  C3-targeting RNA guide sequence portion
uugcagcuuggggacuugcaau

SEQ ID NO: 6972 - RNA, 22 nt, Artificial Sequence
  C3-targeting RNA guide sequence portion
uugccaaugccauuaucuucuc

SEQ ID NO: 6973 - RNA, 22 nt, Artificial Sequence
  C3-targeting RNA guide sequence portion
uugcccaggcuuucaaaggcca

SEQ ID NO: 6974 - RNA, 22 nt, Artificial Sequence
  C3-targeting RNA guide sequence portion
uugcugacgcugguuggaaggu

SEQ ID NO: 6975 - RNA, 22 nt, Artificial Sequence
  C3-targeting RNA guide sequence portion
uuggaagguucaggguuuggug

SEQ ID NO: 6976 - RNA, 22 nt, Artificial Sequence
  C3-targeting RNA guide sequence portion
uuggacuuuacaagauuuggga

SEQ ID NO: 6977 - RNA, 22 nt, Artificial Sequence
  C3-targeting RNA guide sequence portion
uuggagacucggagguuuggac

SEQ ID NO: 6978 - RNA, 22 nt, Artificial Sequence
  C3-targeting RNA guide sequence portion
uuggaggaguugcugacgcugg

SEQ ID NO: 6979 - RNA, 22 nt, Artificial Sequence
  C3-targeting RNA guide sequence portion
uuggagguuuaggcuggguuug

SEQ ID NO: 6980 - RNA, 22 nt, Artificial Sequence
  C3-targeting RNA guide sequence portion
uuggaguguuuagagagguaga

SEQ ID NO: 6981 - RNA, 22 nt, Artificial Sequence
  C3-targeting RNA guide sequence portion
uuggaguuugggauguuucuag

SEQ ID NO: 6982 - RNA, 22 nt, Artificial Sequence
  C3-targeting RNA guide sequence portion
uuggcaagugcgccggcaguca

SEQ ID NO: 6983 - RNA, 22 nt, Artificial Sequence
  C3-targeting RNA guide sequence portion
uuggcguauguggguuugggua

SEQ ID NO: 6984 - RNA, 22 nt, Artificial Sequence
  C3-targeting RNA guide sequence portion
uuggcuacuucggguucaugua

SEQ ID NO: 6985 - RNA, 22 nt, Artificial Sequence
  C3-targeting RNA guide sequence portion
uugggaaugauuauauauauuu

SEQ ID NO: 6986 - RNA, 22 nt, Artificial Sequence
  C3-targeting RNA guide sequence portion
uugggaguuugcagcuugggga

SEQ ID NO: 6987 - RNA, 22 nt, Artificial Sequence
  C3-targeting RNA guide sequence portion
uugggauguuucuagaauugag

SEQ ID NO: 6988 - RNA, 22 nt, Artificial Sequence
  C3-targeting RNA guide sequence portion
uugggcugccugagaguuuggg

SEQ ID NO: 6989 - RNA, 22 nt, Artificial Sequence
  C3-targeting RNA guide sequence portion
uuggggacuugcaauuuucagu

SEQ ID NO: 6990 - RNA, 22 nt, Artificial Sequence
  C3-targeting RNA guide sequence portion
uuggggcauguguggguuuagg

SEQ ID NO: 6991 - RNA, 22 nt, Artificial Sequence
  C3-targeting RNA guide sequence portion
uuggggcauuuggaauugauug

SEQ ID NO: 6992 - RNA, 22 nt, Artificial Sequence
  C3-targeting RNA guide sequence portion
uuggggguccaggucccuguag

SEQ ID NO: 6993 - RNA, 22 nt, Artificial Sequence
  C3-targeting RNA guide sequence portion
uuggggugcucuaagauuugag

SEQ ID NO: 6994 - RNA, 22 nt, Artificial Sequence
  C3-targeting RNA guide sequence portion
uuggguagguagaguugagggu

SEQ ID NO: 6995 - RNA, 22 nt, Artificial Sequence
  C3-targeting RNA guide sequence portion
uuggguguuuauggguugggug

SEQ ID NO: 6996 - RNA, 22 nt, Artificial Sequence
  C3-targeting RNA guide sequence portion
uuggguguuuguggaauccagg

SEQ ID NO: 6997 - RNA, 22 nt, Artificial Sequence
  C3-targeting RNA guide sequence portion
uuggguguuuguggauucaggg

SEQ ID NO: 6998 - RNA, 22 nt, Artificial Sequence
  C3-targeting RNA guide sequence portion
uuggugggauguguggcccccu

SEQ ID NO: 6999 - RNA, 22 nt, Artificial Sequence
  C3-targeting RNA guide sequence portion
uugguuuaggguguauguggug

SEQ ID NO: 7000 - RNA, 22 nt, Artificial Sequence
  C3-targeting RNA guide sequence portion
uuguaaaguccaaaccuccgag

SEQ ID NO: 7001 - RNA, 22 nt, Artificial Sequence
  C3-targeting RNA guide sequence portion
uuguauuuauuaggacuggggu

SEQ ID NO: 7002 - RNA, 22 nt, Artificial Sequence
  C3-targeting RNA guide sequence portion
uugucauuccacggaugugaga

SEQ ID NO: 7003 - RNA, 22 nt, Artificial Sequence
  C3-targeting RNA guide sequence portion
uuguggaauccagguaucaugg

SEQ ID NO: 7004 - RNA, 22 nt, Artificial Sequence
  C3-targeting RNA guide sequence portion
uuguggaauccagguaucgugg

SEQ ID NO: 7005 - RNA, 22 nt, Artificial Sequence
  C3-targeting RNA guide sequence portion
uuguggaauccagguauggugg

SEQ ID NO: 7006 - RNA, 22 nt, Artificial Sequence
  C3-targeting RNA guide sequence portion
uuguggauucagggguuagcag

SEQ ID NO: 7007 - RNA, 22 nt, Artificial Sequence
  C3-targeting RNA guide sequence portion
uugugggucuggaaguccagag

SEQ ID NO: 7008 - RNA, 22 nt, Artificial Sequence
  C3-targeting RNA guide sequence portion
uuuaaacccacacugaaaauug

SEQ ID NO: 7009 - RNA, 22 nt, Artificial Sequence
  C3-targeting RNA guide sequence portion
uuuaaagauuggcuacuucggg

SEQ ID NO: 7010 - RNA, 22 nt, Artificial Sequence
  C3-targeting RNA guide sequence portion
uuuacaagauuugggaguuugc

SEQ ID NO: 7011 - RNA, 22 nt, Artificial Sequence
  C3-targeting RNA guide sequence portion
uuuacauauuuggaguguuuag

SEQ ID NO: 7012 - RNA, 22 nt, Artificial Sequence
  C3-targeting RNA guide sequence portion
uuuagagagguagagguuuagg

SEQ ID NO: 7013 - RNA, 22 nt, Artificial Sequence
  C3-targeting RNA guide sequence portion
uuuagagguuuuggcguaugug

SEQ ID NO: 7014 - RNA, 22 nt, Artificial Sequence
  C3-targeting RNA guide sequence portion
uuuaggcgauugugggucugga

SEQ ID NO: 7015 - RNA, 22 nt, Artificial Sequence
  C3-targeting RNA guide sequence portion
uuuaggcuggguuuggggugcu

SEQ ID NO: 7016 - RNA, 22 nt, Artificial Sequence
  C3-targeting RNA guide sequence portion
uuuaggguguaugugguguuca

SEQ ID NO: 7017 - RNA, 22 nt, Artificial Sequence
  C3-targeting RNA guide sequence portion
uuuaggguuuggggcaugugug

SEQ ID NO: 7018 - RNA, 22 nt, Artificial Sequence
  C3-targeting RNA guide sequence portion
uuuauauacauuugggcugccu

SEQ ID NO: 7019 - RNA, 22 nt, Artificial Sequence
  C3-targeting RNA guide sequence portion
uuuauggguuggguguuugugg

SEQ ID NO: 7020 - RNA, 22 nt, Artificial Sequence
  C3-targeting RNA guide sequence portion
uuuauuaggacugggguguugg

SEQ ID NO: 7021 - RNA, 22 nt, Artificial Sequence
  C3-targeting RNA guide sequence portion
uuucaaaggccaggcccagcug

SEQ ID NO: 7022 - RNA, 22 nt, Artificial Sequence
  C3-targeting RNA guide sequence portion
uuucaguguggguuuaaagauu

SEQ ID NO: 7023 - RNA, 22 nt, Artificial Sequence
  C3-targeting RNA guide sequence portion
uuucuagaauugaggucaucug

SEQ ID NO: 7024 - RNA, 22 nt, Artificial Sequence
  C3-targeting RNA guide sequence portion
uuugaaagccugggcaacgagg

SEQ ID NO: 7025 - RNA, 22 nt, Artificial Sequence
  C3-targeting RNA guide sequence portion
uuugagguuuagagguuuuggc

SEQ ID NO: 7026 - RNA, 22 nt, Artificial Sequence
  C3-targeting RNA guide sequence portion
uuugcagcuuggggacuugcaa

SEQ ID NO: 7027 - RNA, 22 nt, Artificial Sequence
  C3-targeting RNA guide sequence portion
uuuggacuuuacaagauuuggg

SEQ ID NO: 7028 - RNA, 22 nt, Artificial Sequence
  C3-targeting RNA guide sequence portion
uuuggagacucggagguuugga

SEQ ID NO: 7029 - RNA, 22 nt, Artificial Sequence
  C3-targeting RNA guide sequence portion
uuuggaguguuuagagagguag

SEQ ID NO: 7030 - RNA, 22 nt, Artificial Sequence
  C3-targeting RNA guide sequence portion
uuuggcguauguggguuugggu

SEQ ID NO: 7031 - RNA, 22 nt, Artificial Sequence
  C3-targeting RNA guide sequence portion
uuugggaguuugcagcuugggg

SEQ ID NO: 7032 - RNA, 22 nt, Artificial Sequence
  C3-targeting RNA guide sequence portion
uuugggauguuucuagaauuga

SEQ ID NO: 7033 - RNA, 22 nt, Artificial Sequence
  C3-targeting RNA guide sequence portion
uuugggcugccugagaguuugg

SEQ ID NO: 7034 - RNA, 22 nt, Artificial Sequence
  C3-targeting RNA guide sequence portion
uuuggggcauguguggguuuag

SEQ ID NO: 7035 - RNA, 22 nt, Artificial Sequence
  C3-targeting RNA guide sequence portion
uuuggggguccaggucccugua

SEQ ID NO: 7036 - RNA, 22 nt, Artificial Sequence
  C3-targeting RNA guide sequence portion
uuuggggugcucuaagauuuga

SEQ ID NO: 7037 - RNA, 22 nt, Artificial Sequence
  C3-targeting RNA guide sequence portion
uuuggguagguagaguugaggg

SEQ ID NO: 7038 - RNA, 22 nt, Artificial Sequence
  C3-targeting RNA guide sequence portion
uuuggguguuuauggguugggu

SEQ ID NO: 7039 - RNA, 22 nt, Artificial Sequence
  C3-targeting RNA guide sequence portion
uuuggguguuuguggauucagg

SEQ ID NO: 7040 - RNA, 22 nt, Artificial Sequence
  C3-targeting RNA guide sequence portion
uuuggugggauguguggccccc

SEQ ID NO: 7041 - RNA, 22 nt, Artificial Sequence
  C3-targeting RNA guide sequence portion
uuuguggaauccagguaucaug

SEQ ID NO: 7042 - RNA, 22 nt, Artificial Sequence
  C3-targeting RNA guide sequence portion
uuuguggaauccagguaucgug

SEQ ID NO: 7043 - RNA, 22 nt, Artificial Sequence
  C3-targeting RNA guide sequence portion
uuuguggaauccagguauggug

SEQ ID NO: 7044 - RNA, 22 nt, Artificial Sequence
  C3-targeting RNA guide sequence portion
uuuguggauucagggguuagca

SEQ ID NO: 7045 - RNA, 22 nt, Artificial Sequence
  C3-targeting RNA guide sequence portion
uuuucaguguggguuuaaagau

SEQ ID NO: 7046 - RNA, 22 nt, Artificial Sequence
  C3-targeting RNA guide sequence portion
uuuuggcguauguggguuuggg

SEQ ID NO: 7047 - RNA, 20 nt, Artificial Sequence
  Example RNA guide sequence portion
aaaaaaauguacuugguucc

SEQ ID NO: 7048 - RNA, 17 nt, Artificial Sequence
  17 nucleotide guide sequence 1
aaaauguacuugguucc

SEQ ID NO: 7049 - RNA, 17 nt, Artificial Sequence
  17 nucleotide guide sequence 2
aaaaauguacuugguuc

SEQ ID NO: 7050 - RNA, 17 nt, Artificial Sequence
  17 nucleotide guide sequence 3
aaaaaauguacuugguu

SEQ ID NO: 7051 - RNA, 17 nt, Artificial Sequence
  17 nucleotide guide sequence 4
aaaaaaauguacuuggu

SEQ ID NO: 7052 - DNA, 2980 bp, Artificial Sequence
  927-nucleotide homology arm HDR template
tggggcagccccaaaaggggagaggccatggggagaagggggggctgagtgggggaaaggcaggagccagataaaaagccagctccagcaggcgctgctcactcctccccatcctctccctctgtccctctgtccctctgaccctgcactgtcccagcaccatgggacccacctcaggtcccagcctgctgctcctgctactaacccacctccccctggctctggggagtcccatgtgagtggttatgactctacccacaaacagggctggttctggggtggaagcagacatttgggggtccaggtccctgtagaattcagggtgcatttgggtgtttgtggattcaggggttagcaggttgggaatgattatatatatttgggctgcctgtgagtttgggtgtttgtggttgggtgtttgtggaatccaggtatcatggaattggagtttatatacatttgggctgcctgtgagtttgggtgtttgtggttgggtgtttgtggaatccaggtatcgtggaattggagtttatatacatttgggctgcctgagagtttgggtgtttatgggttgggtgtttgtggaatccaggtatggtggaattggagtttgggatgtttctagaattgaggtcatctgttggtttagggtgtatgtggtgttcattgatggtgcggttgggggtgtttggagactcggaggtttggactttacaagatttgggagtttgcagcttggggacttgcaattttcagtgtgggtttaaagattggctacttcgggttcatgtatagttggggcatttggaattgattgtatttattaggactggggtgttggaggtttaggctgggtttggggtgctctaagatttgaggtttagaggttttggcgtatgtgggtttgggtaggtagagttgagggtgtactgacatccactttgcctttctctccacaggatggtgagcaagggcgaggagctgttcaccggggtggtgcccatcctggtcgagctggacggcgacgtaaacggccacaagttcagcgtgtccggcgagggcgagggcgatgccacctacggcaagctgaccctgaagttcatctgcaccaccggcaagctgcccgtgccctggcccaccctcgtgaccaccctgacctacggcgtgcagtgcttcagccgctaccccgaccacatgaagcagcacgacttcttcaagtccgccatgcccgaaggctacgtccaggagcgcaccatcttcttcaaggacgacggcaactacaagacccgcgccgaggtgaagttcgagggcgacaccctggtgaaccgcatcgagctgaagggcatcgacttcaaggaggacggcaacatcctggggcacaagctggagtacaactacaacagccacaacgtctatatcatggccgacaagcagaagaacggcatcaaggtgaacttcaagatccgccacaacatcgaggacggcagcgtgcagctcgccgaccactaccagcagaacacccccatcggcgacggccccgtgctgctgcccgacaaccactacctgagcacccagtccgccctgagcaaagaccccaacgagaagcgcgatcacatggtcctgctggagttcgtgaccgccgccgggatcactctcggcatggacgagctgtacaagggatcctacccatacgatgttccagattacgcgtagtcgagtctagagggcccgtttaaacccgctgatcagcctcgactgtgccttctagttgccagccatctgttgtttgcccctcccccgtgccttccttgaccctggaaggtgccactcccactgtcctttcctaataaaatgaggaaattgcatcgcattgtctgagtaggtgtcattctattctggggggtggggtggggcaggacagcaagggggaggattgggaagacaatagcaggcatgctggggatgcggtgggctctatggtccgggagtttgagtgtttacatatttggagtgtttagagaggtagaggtttagggtttggggcatgtgtgggtttaggcgattgtgggtctggaagtccagagacttggaggagttgctgacgctggttggaaggttcagggtttggtgggatgtgtggccccctcgttgcccaggctttcaaaggccaggcccagctggctgagagtgggagtcatggtggctgctgtcctgcccatgtggttgagacggtggcagtgcccagagaagataatggcattggcaagtgcgccggcagtcactggatcctctccaggaccagaggctggggcacacagcctgccaggcgctgactccagtgaggactggcgtctcacatccgtggaatgacaagcccactcccgtgccccactccgacaggtactctatcatcacccccaacatcttgcggctggagagcgaggagaccatggtgctggaggcccacgacgcgcaaggggatgttccagtcactgttactgtccacgacttcccaggcaaaaaactagtgctgtccagtgagaagactgtgctgacccctgccaccaaccacatgggcaacgtcaccttcacggtgagtgcagactggcgcaggacccggctgacacccacagccacgcccactccccccctcctcctgagcccctccccttctgtcttctccctttctaagccctgcccttccctgagactccaccccttcggagtcgcctctccttctaagcccctcccttctctgagactccaccccttctgagtctcctccccttataagcccctcccttttctgagacccccccccaccccttctgaatctcctccccttctaagccctgaccttccctgagaccccaccccttctgagactcctccccttctgagtccctcccttccctgagaccccaccccttctgaggttcctccccttctctgagactccaccccttctgagtctcctccc

SEQ ID NO: 7053 - DNA, 2653 bp, Artificial Sequence
  800-nucleotide homology arm HDR template
ctctgtccctctgaccctgcactgtcccagcaccatgggacccacctcaggtcccagcctgctgctcctgctactaacccacctccccctggctctggggagtcccatgtgagtggttatgactctacccacaaacagggctggttctggggtggaagcagacatttgggggtccaggtccctgtagaattcagggtgcatttgggtgtttgtggattcaggggttagcaggttgggaatgattatatatatttgggctgcctgtgagtttgggtgtttgtggttgggtgtttgtggaatccaggtatcatggaattggagtttatatacatttgggctgcctgtgagtttgggtgtttgtggttgggtgtttgtggaatccaggtatcgtggaattggagtttatatacatttgggctgcctgagagtttgggtgtttatgggttgggtgtttgtggaatccaggtatggtggaattggagtttgggatgtttctagaattgaggtcatctgttggtttagggtgtatgtggtgttcattgatggtgcggttgggggtgtttggagactcggaggtttggactttacaagatttgggagtttgcagcttggggacttgcaattttcagtgtgggtttaaagattggctacttcgggttcatgtatagttggggcatttggaattgattgtatttattaggactggggtgttggaggtttaggctgggtttggggtgctctaagatttgaggtttagaggttttggcgtatgtgggtttgggtaggtagagttgagggtgtactgacatccactttgcctttctctccacaggatggtgagcaagggcgaggagctgttcaccggggtggtgcccatcctggtcgagctggacggcgacgtaaacggccacaagttcagcgtgtccggcgagggcgagggcgatgccacctacggcaagctgaccctgaagttcatctgcaccaccggcaagctgcccgtgccctggcccaccctcgtgaccaccctgacctacggcgtgcagtgcttcagccgctaccccgaccacatgaagcagcacgacttcttcaagtccgccatgcccgaaggctacgtccaggagcgcaccatcttcttcaaggacgacggcaactacaagacccgcgccgaggtgaagttcgagggcgacaccctggtgaaccgcatcgagctgaagggcatcgacttcaaggaggacggcaacatcctggggcacaagctggagtacaactacaacagccacaacgtctatatcatggccgacaagcagaagaacggcatcaaggtgaacttcaagatccgccacaacatcgaggacggcagcgtgcagctcgccgaccactaccagcagaacacccccatcggcgacggccccgtgctgctgcccgacaaccactacctgagcacccagtccgccctgagcaaagaccccaacgagaagcgcgatcacatggtcctgctggagttcgtgaccgccgccgggatcactctcggcatggacgagctgtacaagggatcctacccatacgatgttccagattacgcgtagtcgagtctagagggcccgtttaaacccgctgatcagcctcgactgtgccttctagttgccagccatctgttgtttgcccctcccccgtgccttccttgaccctggaaggtgccactcccactgtcctttcctaataaaatgaggaaattgcatcgcattgtctgagtaggtgtcattctattctggggggtggggtggggcaggacagcaagggggaggattgggaagacaatagcaggcatgctggggatgcggtgggctctatggtccgggagtttgagtgtttacatatttggagtgtttagagaggtagaggtttagggtttggggcatgtgtgggtttaggcgattgtgggtctggaagtccagagacttggaggagttgctgacgctggttggaaggttcagggtttggtgggatgtgtggccccctcgttgcccaggctttcaaaggccaggcccagctggctgagagtgggagtcatggtggctgctgtcctgcccatgtggttgagacggtggcagtgcccagagaagataatggcattggcaagtgcgccggcagtcactggatcctctccaggaccagaggctggggcacacagcctgccaggcgctgactccagtgaggactggcgtctcacatccgtggaatgacaagcccactcccgtgccccactccgacaggtactctatcatcacccccaacatcttgcggctggagagcgaggagaccatggtgctggaggcccacgacgcgcaaggggatgttccagtcactgttactgtccacgacttcccaggcaaaaaactagtgctgtccagtgagaagactgtgctgacccctgccaccaaccacatgggcaacgtcaccttcacggtgagtgcagactggcgcaggacccggctgacacccacagccacgcccactccccccctcctcctgagcccctccccttctgtcttctccctttctaagccctgcccttccctgagactccaccccttcggagtcgcctctccttctaagcccctcccttctctgagactccaccccttctgagtct

SEQ ID NO: 7054 - DNA, 2053 bp, Artificial Sequence
  500-nucleotide homology arm HDR template
ccaggtatcatggaattggagtttatatacatttgggctgcctgtgagtttgggtgtttgtggttgggtgtttgtggaatccaggtatcgtggaattggagtttatatacatttgggctgcctgagagtttgggtgtttatgggttgggtgtttgtggaatccaggtatggtggaattggagtttgggatgtttctagaattgaggtcatctgttggtttagggtgtatgtggtgttcattgatggtgcggttgggggtgtttggagactcggaggtttggactttacaagatttgggagtttgcagcttggggacttgcaattttcagtgtgggtttaaagattggctacttcgggttcatgtatagttggggcatttggaattgattgtatttattaggactggggtgttggaggtttaggctgggtttggggtgctctaagatttgaggtttagaggttttggcgtatgtgggtttgggtaggtagagttgagggtgtactgacatccactttgcctttctctccacaggatggtgagcaagggcgaggagctgttcaccggggtggtgcccatcctggtcgagctggacggcgacgtaaacggccacaagttcagcgtgtccggcgagggcgagggcgatgccacctacggcaagctgaccctgaagttcatctgcaccaccggcaagctgcccgtgccctggcccaccctcgtgaccaccctgacctacggcgtgcagtgcttcagccgctaccccgaccacatgaagcagcacgacttcttcaagtccgccatgcccgaaggctacgtccaggagcgcaccatcttcttcaaggacgacggcaactacaagacccgcgccgaggtgaagttcgagggcgacaccctggtgaaccgcatcgagctgaagggcatcgacttcaaggaggacggcaacatcctggggcacaagctggagtacaactacaacagccacaacgtctatatcatggccgacaagcagaagaacggcatcaaggtgaacttcaagatccgccacaacatcgaggacggcagcgtgcagctcgccgaccactaccagcagaacacccccatcggcgacggccccgtgctgctgcccgacaaccactacctgagcacccagtccgccctgagcaaagaccccaacgagaagcgcgatcacatggtcctgctggagttcgtgaccgccgccgggatcactctcggcatggacgagctgtacaagggatcctacccatacgatgttccagattacgcgtagtcgagtctagagggcccgtttaaacccgctgatcagcctcgactgtgccttctagttgccagccatctgttgtttgcccctcccccgtgccttccttgaccctggaaggtgccactcccactgtcctttcctaataaaatgaggaaattgcatcgcattgtctgagtaggtgtcattctattctggggggtggggtggggcaggacagcaagggggaggattgggaagacaatagcaggcatgctggggatgcggtgggctctatggtccgggagtttgagtgtttacatatttggagtgtttagagaggtagaggtttagggtttggggcatgtgtgggtttaggcgattgtgggtctggaagtccagagacttggaggagttgctgacgctggttggaaggttcagggtttggtgggatgtgtggccccctcgttgcccaggctttcaaaggccaggcccagctggctgagagtgggagtcatggtggctgctgtcctgcccatgtggttgagacggtggcagtgcccagagaagataatggcattggcaagtgcgccggcagtcactggatcctctccaggaccagaggctggggcacacagcctgccaggcgctgactccagtgaggactggcgtctcacatccgtggaatgacaagcccactcccgtgccccactccgacaggtactctatcatcacccccaacatcttgcggctggagagcgaggagaccatggtgctggaggcccacgacgcgcaagggg

SEQ ID NO: 7055 - protein, 1062 aa, Unknown
  OMNI-79 CRISPR Nuclease
MEKRLGLDIGTNSIGWCLYEGDSILDIGVRIFSDGRDPKSGASLAVDRRNARAMRRRRDRYLGRRSALIKALKAHGLFPAEQDAAKALEREDPYSLRVRALDHRLDPHQIGRAIFHLNQRRGFRSNRKADRVLGDQESGLISTATRVLDEAMAKSGARTLGEFLASRDTRRVRMRPDVKGYDFYPNRQHYLEEFEKIWDAQSQYHPDLLSQQAKSAIHRIIFHQRPLKPQAVGTCTFAGLHGIPGDETRLPKAHPLFQQRRLYEEVNQLEIVCASAPARKLTRDERDALILKLQDKKKVTFSTLARTIRLKEGERFNKESENRKDLAGDEVRAEMSDKTRFGRRWFHLSLDEQWSVIDRLLNEESTEDLLAWLEKEWSLPSDVAEAVANAHLPDGHGRFGLTATVRLLEHLKADVVTYAEAARRAGFHHSDFRDGACYDELPYYGEILSREIAPGKDEYGDPLERQWGKITNPTVHIGLNQLRRLINALVRRHGRPDFIFVELARELKLNEKQKADHKRRIKQTTDAARARAEKLREIGQRDSGSNRMLLRIWEELNPSNPLDRRCPYCAEPISIEMLMSGSADIDHIVPYSRCLDDSAANKVVAHNHCNRQKGNRTPWEQWGQTTRWPLIQEQVARMHRSKQWRFGPDAMERVDRDGGFIARQLTDTQYLSRIAAQYLSALYTPDEGRRVYAVTGRLTAMLRRLWGLNDILPDHNWVLNPHSNAPKNRLDHRHHAIDAAVVGATTPAMIQQVARAAARAEEQDLDRLFADLPPPWPGFREELQGRIMAAVVSHKPDHGRKGRPLPGRDSTSGRLHNDTAYGFTGRRNAKGMPIVVTRKPLLALKPEDLTDPERIPDPALQGALFEATRGATGKDFEKALRDFSRRDGPYQGIRRIRLTEALNVIPIRDRTGHAYKGVKGDANARFDVWRLPDGKWITRWKDRDGIEHSGIVSLFDAHQPSQVYHRPHPAAKKVLSLRQNDLVAVEHDGDPGKIMRVVKFSANGSITFAPHNEAGPLKTRDTDPADPFRYVTTVASGLKKMRARQVRIDELGKVHDPGPRED

SEQ ID NO: 7056 - protein, 1062 aa, Artificial Sequence
  OMNI-79 V5570 CRISPR Nuclease
MEKRLGLDIGTNSLGWCLYEGDSILDIGVRIFSDGRDPKSGASLAVDRRNARAMRRRRDRYLGRRSALIKALKAHGLFPAEQDAAKALEREDPYSLRVRALDHRLDPHQIGRAIFHLNQRRGFRSNRKADRVLGDQESGLISTATRVLDEAMAKSGARTLGEFLASRDTRRVRMRPDVKGYDFYPNRQHYLEEFEKIWDAQSQYHPDLLSQQAKSAIHRIIFHQRPLKPQAVGTCTFAGLHGIPGDETRLPKAHPLFQQRRLYEEVNQLEIVCASAPARKLTRDERDALILKLQDKKKVTFSTLARTIRLKEGERFNKESENRKDLAGDEVRAEMSDKTRFGRRWFHLSLDEQWSVIDRLLNEESTEDLLAWLEKEWSLPSDVAEAVANAHLPDGHGRFGLTATVRLLEHLKADVVTYAEAARRAGFHHSDFRDGACYDELPYYGEILSREIAPGKDEYGDPLERQWGKITNPTVHIGLNQLRRLINALVRRHGRPDFIFVELARELKLNEKQKADHKRRIKQTTDAARARAEKLREIGQRDSGSNRMLLRIWEELNPSNPLDRRCPYCAEPISIEMLMSGSADIDHIVPYSRCLDDSAANKVVAHNHCNRQKGNRTPWEQWGQTTRWPLIQEQVARMHRSKQWRFGPDAMERVDRDGGFIARQLTDTQYLSRIAAQYLSALYTPDEGRRVYAVTGRLTAMLRRLWGLNDILPDHNWVLNPHSNAPKNRLDHRHHAIDAAVVGATTPAMIQQVARAAARAEEQDLDRLFADLPPPWPGFREELQGRIMAAVVSHKPDHGRKGRPLPGRDSTSGRLHNDTAYGFTGRRNAKGMPIVVTRKPLLALKPEDLTDPERIPDPALQGALFEATRGATGKDFEKALRDFSRRDGPYQGIRRIRLTEALNVIPIRDRTGHAYKGVKGDANARFDVWRLPDGKWITRWKDRDGIEHSGIVSLFDAHQPSQVYHRPHPAAKKVLSLRQNDLVAVEHDGDPGKIMRVVKFSANGRITFAPHNEAGPLKTRDTDPADPFRYVTTVASGLKKMRARQVRIDELGKVHDPGPRED

SEQ ID NO: 7057 - protein, 1370 aa, Ezakiella peruensis strain M6.X2
MTKVKDYYIGLDIGTSSVGWAVTDEAYNVLKFNSKKMWGVRLFDDAKTAEERRGQRGARRRLDRKKERLSLLQDFFAEEVAKVDPNFFLRLDNSDLYMEDKDQKLKSKYTLFNDKDFKDKNFHKKYPTIHHLLMDLIEDDSKKDIRLVYLACHYLLKNRGHFIFEGQKFDTKSSFENSLNELKVHLNDEYGLDLEFDNENLINILTDPKLNKTAKKKELKSVIGDTKFLKAVSAIMIGSSQKLVDLFENPEDFDDSAIKSVDFSTTSFDDKYSDYELALGDKIALVNILKEIYDSSILENLLKEADKSKDGNKYISNAFVKKYNKHGQDLKEFKRLVRQYHKSAYFDIFRSEKVNDNYVSYTKSSISNNKRVKANKFTDQEAFYKFAKKHLETIKYKINKVNGSKADLELIDGMLRDMEFKNFMPKIKSSDNGVIPYQLKLMELNKILENQSKHHEFLNVSDEYGSVCDKIASIMEFRIPYYVGPLNPNSKYAWIKKQKDSEITPWNFKDVVDLDSSREEFIDSLIGRCTYLKDEKVLPKASLLYNEYMVLNELNNLKLNDLPITEEMKKKIFDQLFKTRKKVTLKAVANLLKKEFNINGEILLSGTDGDFKQGLNSYNDFKAIVGDKVDSDDYRDKIEEIIKLIVLYGDDKSYLQKKIKAGYGKYFTDSEIKKMAGLNYKDWGRLSKKLLTGLEGANKITGERGSIIHFMREYNLNLMELMSASFTFTEEIQKLNPVDDRKLSYEMVDELYLSPSVKRMLWQSLRIVDEIKNIMGTDSKKIFIEMARGKEEVKARKESRKNQLLKFYKDGKKAFISEIGEERYSYLLSEIEGEEENKFRWDNLYLYYTQLGRCMYSLEPIDISELSSKNIYDQDHIYPKSKIYDDSIENRVLVKKDLNSKKGNSYPIPDEILNKNCYAYWKILYDKGLIGQKKYTRLTRRTGFTDDELVQFISRQIVETRQATKETANLLKTICKNSEIVYSKAENASRFRQEFDIVKCRAVNDLHHMHDAYINIIVGNVYNTKFTKDPMNFVKKQEKARSYNLENMFKYDVKRGGYTAWIADDEKGTVKNASIKRIRKELEGTNYRFTRMNYIESGALFNATLQRKNKGSRPLKDKGPKSSIEKYGGYTNINKACFAVLDIKSKNKIERKLMPVEREIYAKQKNDKKLSDEIFSKYLKDRFGIEDYRVVYPVVKMRTLLKIDGSYYFITGGSDKTLELRSALQLILPKKNEWAIKQIDKSSENDYLTIERIQDLTEELVYNTFDIIVNKFKTSVFKKSFLNLFQDDKIENIDFKFKSMDFKEKCKTLLMLVKAIRASGVRQDLKSIDLKSDYGRLSSKTNNIGNYQEFKIINQSITGLFENEVDLLKL

SEQ ID NO: 7058 - RNA, 80 nt, Artificial Sequence
  OMNI-79 sgRNA Scaffold
guugccgcuggagaaauccaguuguuaacaagcagcuugacugcaccaaauaaggcgggggcugcggcccucgcuuuuuu

SEQ ID NO: 7059 - RNA, 112 nt, Artificial Sequence
  OMNI-50 sgRNA Scaffold
guuugagaguuauguaagaaauuacaugacgaguucaaauaaaaauuuauucaaaccgccuauuuauaggccgcagauguucugcauuaugcuugcuauugcaagcuuuuuu

1. A method for modifying in a cell an allele of the Complement component 3 (C3) gene, the method comprising
introducing to the cell a composition comprising:
at least one CRISPR nuclease or a nucleotide sequence encoding a CRISPR nuclease; and
a RNA molecule comprising a guide sequence portion having 17-50 nucleotides or a nucleotide sequence encoding the same,
wherein a complex of the CRISPR nuclease and the RNA molecule affects a double strand break in the allele of the C3 gene.

2. The method of claim 1, wherein the composition further comprises a donor molecule containing a sequence of nucleotides that is introduced at the double strand break site such that the expression of the introduced sequence of nucleotides is mediated by the promoter of the C3 gene.

3. The method of claim 2, wherein the introduced sequence is a sequence from a ATP7B, A1AT, G6PC, SERPINA, LDLR, TTR, ornithine transcarbamylase, argininosuccinic acid synthetase, arginase, argininosuccinase, carbamoyl phosphate synthetase, and N-acetylglutamate synthetase, Alpha Galactosidase A, Coagulation Factor IX, Coagulation Factor VII, Lysosomal Alpha Glucosidase, Fibrinogen, Phenylalanine 4 Hydroxylase, Alkaline Phosphatase, Glucosylceramidase, Beta Galactosidase, Porphobilinogen Deaminase, Arylsulfatase B, Beta Glucuronidase, Alpha N Acetylglucosaminidase, Lysosomal Alpha, Alpha L-Iduronidase, Mannosidase, Phosphatidylcholine Sterol Acyltransferase, N-Sulphoglucosamine Sulphohydrolase, Coagulation Factor X, N-Acetylgalactosamine-6-Sulfatase, Sphingomyelin Phosphodiesterase, A1AT, Iduronate-2-Sulfatase, Lysosomal Alpha Glucosidase, Cyclin Dependent Kinase Like 5, Prolow Density Lipoprotein Receptor Related Protein 1, Phenylalanine Ammonia Lyase, Protein Glutamine Gamma Glutamyltransferase K, or Lysosomal Protective Protein encoding gene.

4. The method of claim 1, wherein the guide sequence portion of the RNA molecule targets the CRISPR nuclease to a SNP position of a C3 allele.

5. The method of claim 4, wherein the SNP position is any one of rs17030, rs199713383, and rs35473940, and/or wherein the SNP position contains a heterozygous SNP.

6. The method of claim 1, wherein the guide sequence portion of the RNA molecule comprises 17-50 contiguous nucleotides containing nucleotides in the sequence set forth in any one of SEQ ID NOs: 1-7,046 that targets a SNP position of a C3 allele.

7. (canceled)

8. The method of claim 1, wherein the RNA molecule comprises a non-discriminatory guide sequence portion that targets Intron 1 of C3 or a 3′ untranslated region (3′ UTR) of C3, and/or wherein the RNA molecule comprises a non-discriminatory guide portion that targets a sequence that is located within a genomic range selected from any one of 19:6677732-6677881 and 19:6719404-6720515.

9. (canceled)

10. The method of claim 1, wherein the guide sequence portion of the RNA molecule comprises 17-50 contiguous nucleotides containing nucleotides in the sequence set forth in any one of SEQ ID NOs: 1-7,046, and/or wherein the guide sequence portion of the RNA molecule comprises 1, 2, 3, 4, or 5 nucleotide mismatches relative to a fully-complementary C3 target sequence.

11. (canceled)

12. The method of claim 1, wherein the guide sequence portion of the RNA molecule comprises 17-50 contiguous nucleotides containing nucleotides in the sequence set forth in any one of SEQ ID NOs: 1-7,046 modified to contain 1, 2, 3, 4, or 5 nucleotide mismatches relative to a fully-complementary C3 target sequence, and/or wherein the guide sequence portion provides higher targeting specificity to the complex of the CRISPR nuclease and the RNA molecule relative to a guide sequence portion that has higher complementarity to an allele of the C3 gene.

13. (canceled)

14. A modified cell obtained by the method of claim 1.

15. The method of claim 14, wherein the modified cell is a stem cell, liver cell, hepatocyte, or iPS-derived hepatocyte.

16. An RNA molecule comprising a guide sequence portion having 17-50 contiguous nucleotides containing nucleotides in the sequence set forth in any one of SEQ ID NOs: 1-7,046, or SEQ ID NOs: 1-7,046 modified to contain 1, 2, 3, 4, or 5 nucleotide mismatches relative to a fully-complementary C3 target sequence.

17. A composition comprising the RNA molecule of claim 16 and at least one CRISPR nuclease.

18. The composition of claim 17, further comprising a donor molecule.

19. The composition of claim 18, wherein the donor molecule contains a sequence from a ATP7B, A1AT, G6PC, SERPINA, LDLR, TTR, ornithine transcarbamylase, argininosuccinic acid synthetase, arginase, argininosuccinase, carbamoyl phosphate synthetase, N-acetylglutamate synthetase, Alpha Galactosidase A, Coagulation Factor IX, Coagulation Factor VII, Lysosomal Alpha Glucosidase, Fibrinogen, Phenylalanine 4 Hydroxylase, Alkaline Phosphatase, Glucosylceramidase, Beta Galactosidase, Porphobilinogen Deaminase, Arylsulfatase B, Beta Glucuronidase, Alpha N Acetylglucosaminidase, Lysosomal Alpha, Alpha L-Iduronidase, Mannosidase, Phosphatidylcholine Sterol Acyltransferase, N-Sulphoglucosamine Sulphohydrolase, Coagulation Factor X, N-Acetylgalactosamine-6-Sulfatase, Sphingomyelin Phosphodiesterase, A1AT, Iduronate-2-Sulfatase, Lysosomal Alpha Glucosidase, Cyclin Dependent Kinase Like 5, Prolow Density Lipoprotein Receptor Related Protein 1, Phenylalanine Ammonia Lyase, Protein Glutamine Gamma Glutamyltransferase K, or Lysosomal Protective Protein encoding gene.

20. A method for modifying a C3 allele in a cell, the method comprising delivering to the cell the composition of claim 18.

21. A method for treating a disorder, the method comprising delivering to a cell of a subject having the disorder the composition of claim 17.

22. (canceled)

23. (canceled)

24. (canceled)

25. The method of claim 21, wherein the disorder is a liver-related disorder or a lysosomal storage disorder.

26. (canceled)

27. A method for treating a disorder, the method comprising delivering to the subject the modified cell of claim 14.

28. The method of claim 27, wherein the disorder is a liver-related disorder or a lysosomal storage disorder.
